(19) United States
(12) Patent Application Publication
(10) Pub. No.: US 2018/0273935 A1
(43) Pub. Date: Sep. 27, 2018

(54) METHODS AND COMPOSITIONS FOR GENERATING CRISPR/CAS GUIDE RNAS

(71) Applicant: The Regents of the University of California, Oakland, CA (US)

(72) Inventors: Andrew B. Lane, Berkeley, CA (US); Rebecca Heald, Berkeley, CA (US)

(21) Appl. No.: 15/765,420

(22) PCT Filed: Jun. 2, 2016
(86) PCT No.: PCT/US16/35534

§ 371 Date: Apr. 2, 2018

Related U.S. Application Data
(60) Provisional application No. 62/171,976, filed on Jun. 5, 2015.
(60) Provisional application No. 62/221,836, filed on Sep. 22, 2015.

(51) Int. Cl. C12N 15/10; C12N 9/22; C12N 15/113; C12N 15/52; C12P 19/34; C12N 15/11; C12Q 1/6855; C40B 50/08; C40B 40/06

(52) U.S. Cl. CPC C12N 15/1093; C12N 9/22; C12N 15/113; C12N 15/52; C12P 19/34; C12N 15/111; C12Q 2525/191; C40B 50/08; C40B 40/06; C12N 2310/20; C12Q 2521/301; C12Q 2521/313; C12Q 1/6855

(57) ABSTRACT

The present disclosure provides methods, kits, and compositions for generating DNA molecules encoding CRISPR/Cas guide RNAs (e.g., Cas9 single guide RNAs or Cas9 targeter RNAs). A library of such DNA molecules can be generated from any DNA source. The methods include a step of contacting target DNA with one or more DNA endonucleases that specifically bind to and cleave within a recognition sequence that includes a PAM sequence, to generate a plurality of cleavage fragments, to which a DNA adapter can be attached. A distal-cleaving DNA endonuclease can be used that specifically binds to a recognition sequence in the DNA adapter and cleaves at a site within the attached DNA cleavage fragments to generate a library of CRISPR/Cas guide sequences. After removal of all or a portion of the DNA adapter, a constant region of a guide RNA can be attached to generate DNA molecules encoding CRISPR/Cas guide RNAs.

### CROSS-REFERENCE

[0001] This application claims the benefit of U.S. Provisional Patent Application Nos. 62/171,976, filed Jun. 5, 2015, and 62/221,836, filed Sep. 22, 2015, which applications are incorporated herein by reference in their entirety.

### INCORPORATION BY REFERENCE OF SEQUENCE LISTING PROVIDED AS A TEXT FILE

[0002] A Sequence Listing is provided herewith as a text file, “BERK-289WO_SeqList_ST25.txt” created on Jun. 2, 2016 and having a size of 7,639 KB. The contents of the text file are incorporated by reference herein in their entirety.

### INTRODUCTION

[0003] RNA-mediated adaptive immune systems in bacteria and archaea rely on Clustered Regularly Interspaced Short Palindromic Repeat (CRISPR) genomic loci and CRISPR-associated (Cas) proteins that function together to provide protection from invading viruses and plasmids. In Type II CRISPR-Cas systems, the Cas9 protein functions as an RNA-guided endonuclease that uses a dual-guide RNA consisting of crRNA and trans-activating crRNA (tracrRNA) for target recognition and cleavage by a mechanism involving two nuclease active sites that together generate double-stranded DNA breaks (DSBs).

[0004] RNA-programmed Cas9 has proven to be a versatile tool for genome engineering in multiple cell types and organisms. Guided by a dual-RNA complex or a chimeric single-guide RNA, Cas9 (or variants of Cas9 such as nickase variants, catalytically inactive variants, etc.) can generate site-specific DSBs or single-stranded breaks (SSBs) within target nucleic acids, or can bind specifically to a specific region of a target nucleic acid. Target nucleic acids can include double-stranded DNA (dsDNA) and single-stranded DNA (ssDNA) as well as RNA. When cleavage of a target nucleic acid occurs within a cell (e.g., a eukaryotic cell), the break in the target nucleic acid can be repaired by non-homologous end joining (NHEJ) or homology directed repair (HDR).

[0005] The Cas9 system provides a facile means of modifying genomic information and/or for binding to specific loci within a target nucleic acid (e.g., for labeling/imaging applications). In addition, catalytically inactive Cas9 alone or fused to domains from other proteins to modify target nucleic acids or proteins associated with target nucleic acids (e.g., transcriptional activator or repressor domains to alter transcription of target genes).

[0006] CRISPR-based technologies have emerged as powerful tools to alter genomes and mark chromosomal loci, but there is a need in the art for cost effective methods and compositions for generating sets (e.g., libraries) of guide RNAs that can target descrete loci within a given target nucleic acid (e.g., whole chromosome/genome Cas9 guide RNA libraries).

### SUMMARY

[0007] The present disclosure provides methods, kits, and compositions for generating a library of DNA molecules encoding CRISPR/Cas guide RNAs. For example, the present disclosure provides compositions, kits, and methods for generating a library of DNA molecules encoding Cas9 single guide RNAs (sgRNAs) or Cas9 targeter RNAs.

[0008] The methods provided herein can include the step of cleaving a target DNA molecule (any target DNA molecule from any organism, e.g., a chromosome, a collection of chromosomes such as a eukaryotic genome, etc.) with one or more DNA endonucleases (PAM-recognition DNA endonucleases) that specifically bind to and cleave within a recognition sequence that includes a PAM sequence (e.g., a Cas9 PAM sequence), thereby generating a plurality of DNA cleavage fragments. A DNA adapter can be attached (e.g., ligated) to the DNA cleavage fragments and then contacted with a distal-cleaving DNA endonuclease (a DNA endonuclease that specifically binds to a recognition sequence present in the DNA adapter but cleaves at a site within the DNA cleavage fragment) to generate a library of CRISPR/Cas guide sequences (e.g., Cas9 guide sequences). After removal of all or a portion of the DNA adapter, a constant region of a CRISPR/Cas guide RNA (e.g., a constant region of a Cas9 targeter RNA or Cas9 sgRNA) can be attached to the library of guide sequences to generate a library of DNA molecules encoding CRISPR/Cas guide RNAs (e.g., a library of DNA molecules encoding Cas9 single guide RNAs (sgRNAs) or Cas9 targeter RNAs).

[0009] As an example, in some cases, a method of generating a library of DNA molecules encoding Cas9 single guide RNAs (sgRNAs) or Cas9 targeter RNAs includes: (a) contacting a target DNA molecule with a first DNA endonuclease that specifically binds to and cleaves within a recognition sequence that includes a Cas9 PAM sequence, to generate a plurality of cleavage fragments; (b) attaching a first DNA adapter to the plurality of cleavage fragments to generate a plurality of adapter-attached cleavage fragments, each having an adapter segment and a cleavage fragment segment; (c) contacting the plurality of adapter-attached cleavage fragments with a second DNA endonuclease that specifically binds to a recognition sequence present in the adapter segment and cleaves within the cleavage fragment segment to generate a plurality of adapter-attached Cas9 guide sequences each having an adapter segment and a guide sequence segment; (d) contacting the plurality of adapter-attached Cas9 guide sequences with a third DNA endonuclease that specifically binds to a recognition sequence present in the adapter segment and cleaves at one or more sites to remove all or a portion of the adapter segment, thereby generating a plurality of Cas9 guide sequences; and (e) attaching DNA encoding a constant region of a Cas9 sgRNA or a Cas9 targeter RNA to the plurality of Cas9 guide sequences to generate a library of DNA molecules encoding Cas9 sgRNAs or Cas9 targeter RNAs.

[0010] In some cases, the method includes a step of circularizing the plurality of adapter-attached Cas9 guide sequences. In some cases, the first DNA adapter includes the DNA encoding the constant region of a Cas9 sgRNA or a Cas9 targeter RNA. In some cases, said contacting of step (d) removes a portion of the adapter segment that is present between the Cas9 guide sequence and the DNA encoding the constant region of a Cas9 sgRNA or a Cas9 targeter RNA. In some cases, the third DNA endonuclease of step (d) cleaves at or near the junction of the adapter segment and the guide sequence segment, and removes all or most of the adapter segment from the plurality of adapter-attached Cas9 guide sequences In some cases, step (e) includes attaching a DNA Linker to the plurality of Cas9 guide sequences, wherein the DNA Linker encodes the constant region of the Cas9 sgRNA or the Cas9 targeter RNA. In some cases, step (e) includes inserting the plurality of Cas9 guide sequences into a vector that encodes the constant region of the Cas9 sgRNA or the Cas9 targeter RNA.

[0011] In some cases, the first DNA adapter includes two recognition sequences that can be specifically bound by the second DNA endonuclease, wherein the two recognition sequences are positioned at opposite ends of the first DNA adapter such that the second DNA endonuclease will cleave within the cleavage fragment segment regardless of the orientation at which the first DNA adapter is attached to each cleavage fragment of the plurality of cleavage fragments. In some cases, the first DNA endonuclease is selected from: BfaI, HpaII, ScrFI, MspI, BstNI, NciI, BsiSI, HapII, MaeI, XspI, AsuC2I, BcnI, BpuMI, CauII, BciT130I, BptI, BseBI, BsiLI, Bst2UI, BstOI, MvaI, Bme1390I, BmrFI, and MspR9I. In some cases, step (a) includes contacting the DNA molecule with two or more PAM-recognition DNA endonucleases that each specifically binds to and cleaves within a recognition sequence that includes a Cas9 PAM sequence. In some cases, step (a) includes contacting the DNA molecule with three or more PAM-recognition DNA endonucleases that each specifically binds to and cleaves within a recognition sequence that includes a Cas9 PAM sequence. In some cases, the three or more PAM-recognition DNA endonucleases include BfaI, HpaII, and ScrFI. In some cases, the second DNA endonuclease cleaves at a distance of from 17 to 30 nucleotides from its recognition sequence. In some cases, the second DNA endonuclease cleaves at a site that is 17 to 30 nucleotides from the junction of the adapter segment and the cleavage fragment segment. In some cases, the second DNA endonuclease is a type II DNA endonuclease. In some cases, the second DNA endonuclease is selected from the group consisting of: ApyPI, AquII, AquIII, AquIV, CdpI, CstMI, DraRI, DrdIV, MaqI, MmeI, NhaXI, NlaCI, NmeAIII, PlaDI, PspOMII, PspPRI, RceI, RpaB5I, SdeAI, SpoDI, and BsbI. In some cases, the generated DNA molecules encoding Cas9 sgRNAs or Cas9 targeter RNAs each include a guide sequence that is in a range of from 17 nucleotides to 25 nucleotides in length. In some cases, the third DNA endonuclease cleaves at a distance of from 1 to 20 nucleotides from its recognition sequence. In some cases, the third DNA endonuclease is BsaXI.

[0012] In some cases, the method includes a step of blunting cleavage products that are produced by one or more of said steps (a), (c), and (d). In some cases, the method includes a step of blunting the plurality of cleavage fragments produced in step (a). In some cases, the blunting includes contacting the plurality of cleavage fragments generated in step (a) with a nuclease that removes single stranded overhang DNA. In some cases, the method includes a step of attaching a second DNA adapter to the plurality of adapter-attached Cas9 guide sequences generated in step (c), wherein the second DNA adapter comprises (i) an RNA polymerase promoter positioned such that it is operably linked to the Cas9 guide sequences once the second DNA adapter is attached, and/or (ii) an overhang or recognition sequence for cloning or circularization. In some cases, the method includes contacting the library of DNA molecules encoding Cas9 sgRNAs or Cas9 targeter RNAs with an RNA polymerase to generate a library of Cas9 sgRNAs or Cas9 targeter RNAs.

[0013] In some cases, a subject kit for generating a library of DNA molecules encoding guide RNAs (e.g., Cas9 single guide RNAs (sgRNAs), Cas9 targeter RNAs, etc.) includes (a) a first DNA adapter, two DNA oligonucleotides that hybridize to form said first DNA adapter, or a nucleic acid comprising said first DNA adapter, wherein the first DNA adapter includes: (i) a first recognition sequence for a first DNA endonuclease that cleaves at a cleavage site outside of the first recognition sequence, wherein the first recognition sequence is positioned within the first DNA adapter such that said first DNA endonuclease will specifically bind to the first recognition sequence and will cleave at a site within a target DNA sequence that is attached to the first DNA adapter; and (ii) a second recognition sequence for a second DNA endonuclease that cleaves at a cleavage site outside of the second recognition sequence, wherein the second recognition sequence is positioned within the first DNA adapter such that said second DNA endonuclease will cleave within or immediately adjacent to the first recognition sequence. In some cases, the first DNA adapter comprises a nucleotide sequence encoding a constant region of a Cas9 sgRNA or a Cas9 targeter RNA. In some cases, the kit includes a vector that includes the first DNA adapter.

[0014] In some cases, the kit includes at least one of: (i) a DNA linker, (ii) two DNA oligonucleotides that hybridize to form said DNA linker, and (iii) a nucleic acid comprising said DNA linker; wherein the DNA linker comprises a nucleotide sequence encoding a constant region of a Cas9 targeter RNA or a Cas9 sgRNA. In some cases, the kit includes a vector that includes the DNA linker. In some cases, the kit includes at least one of: (i) a second DNA adapter, (ii) two DNA oligonucleotides that hybridize to form said second DNA adapter, and (iii) a nucleic acid comprising said second DNA adapter; wherein the second DNA adapter comprises one or more of: (a) an RNA polymerase promoter, (b) a recognition sequence that facilitates cloning, and (c) an overhang. In some cases, the kit includes a vector that includes the second DNA adapter.

[0015] In some cases, the kit includes a nucleic acid that includes the first and second DNA adapters, wherein (i) the nucleic acid is linear and the first and second DNA adapters are positioned on opposite ends of the nucleic acid, or (ii) the nucleic acid is circular and the first and second DNA adapters are positioned adjacent to one another such that cleavage between the first and second DNA adapters will produce a linear nucleic acid in which the first and second DNA adapters are positioned on opposite ends. In some cases, the nucleic acid that includes the first and second DNA adapters is a vector. In some cases, the vector is a viral vector or a plasmid vector.

[0016] In some cases, a subject kit includes a blunting nuclease that removes single stranded DNA overhangs. In some cases, the blunting nuclease is mung bean nuclease.

[0017] In some cases, the first and/or second DNA adapter includes a recognition sequence that can be specifically bound and cleaved by a PAM-recognition DNA endonuclease. In some cases, the first recognition sequence is a recognition sequence for one or more DNA endonucleases selected from the group consisting of: MmeI, NmeAIII, and BsbI. In some cases, the first recognition sequence is a recognition sequence for MmeI. In some cases, the second recognition sequence is a recognition sequence for BsaXI.

[0018] In some cases, a subject kit includes one or both of: (i) the first DNA endonuclease, and (ii) the second DNA endonuclease. In some cases, the first DNA endonuclease cleaves at a cleavage site that is 17 to 30 nucleotides from the first recognition sequence. In some cases, the first DNA endonuclease is selected from the group consisting of: MmeI, NmeAIII, and BsbI. In some cases, the first DNA endonuclease is MmeI. In some cases, the second DNA endonuclease cleaves at a cleavage site that is 1 to 20 nucleotides from the second recognition sequence. In some cases, the second DNA endonuclease is BsaXI.

[0019] In some cases, a subject kit includes one or more PAM-recognition DNA endonucleases that each specifically binds to and cleaves within a recognition sequence that includes a Cas9 PAM sequence. In some cases, a subject kit includes two or more PAM-recognition DNA endonucleases that each specifically binds to and cleaves within a recognition sequence that includes a Cas9 PAM sequence. In some cases, a subject kit includes three or more PAM-recognition DNA endonucleases that each specifically binds to and cleaves within a recognition sequence that includes a Cas9 PAM sequence. In some cases, a kit includes the PAM-recognition DNA endonucleases BfaI, HpaII, and ScrFI. In some cases, the PAM-recognition DNA endonucleases are selected from the group consisting of: BfaI, HpaII, ScrFI, MspI, BstNI, NciI, BsiSI, HapII, MaeI, XspI, AsuC2I, BcnI, BpuMI, CauII, BciT130I, BptI, BseBI, BsiLI, Bst2UI, BstOI, MvaI, Bme1390I, BmrFI, and MspR9I.

### BRIEF DESCRIPTION OF THE DRAWINGS

[0020] FIG. 1A-1E present data related to showing that repetitive genomic loci can be visualized using dCas9-Neon in Xenopus egg extracts.

[0021] FIG. 2A-2B present data related to showing that a guide library generated according to the subject methods can program dCas9-Neon labeling of a repetitive locus.

[0022] FIG. 3A-3C provides data related to showing that a single 3.4 MB locus can be labeled using an enzymatically generated guide library (Cas9 guide RNA library).

[0023] FIG. 4A-4F present data related to the generation of a library of DNA molecules encoding Cas9 guide RNAs for targeting sequences within the E. coli genome.

[0024] FIG. 5 presents a schematic of how Xenopus egg extract allows study of cell cycle chromosome events in vitro.

[0025] FIG. 6 presents data showing that repetitive genomic loci can be visualized using dCas9-Neon.

[0026] FIG. 7 presents PCR products related to construction of a subject library.

[0027] FIG. 8A-8B present schematic examples of compositions and methods provided herein.

[0028] FIG. 9A-9B present the DNA adapters of the protocols presented that correspond to FIG. 8A and FIG. 8B.

[0029] FIG. 10 present the recognition sequences for MmeI and BsaXI.

[0030] FIG. 11 presents a schematic diagram of an example Cas9 single guide RNA (Cas9 sgRNA). The constant region is labeled for the sgRNA (and for the Targeter in cases where the Cas9 guide RNA is a dual guide RNA).

### DEFINITIONS

[0031] The terms “polynucleotide” and “nucleic acid,” used interchangeably herein, refer to a polymeric form of nucleotides of any length, either ribonucleotides or deoxynucleotides. Thus, this term includes, but is not limited to, single-, double-, or multi-stranded DNA or RNA, genomic DNA, cDNA, DNA-RNA hybrids, or a polymer comprising purine and pyrimidine bases or other natural, chemically or biochemically modified, non-natural, or derivatized nucleotide bases. The terms “polynucleotide” and “nucleic acid” should be understood to include, as applicable to the embodiment being described, single-stranded (such as sense or antisense) and double-stranded polynucleotides.

[0032] The terms “peptide,” “polypeptide,” and “protein” are used interchangeably herein, and refer to a polymeric form of amino acids of any length, which can include coded and non-coded amino acids, chemically or biochemically modified or derivatized amino acids, and polypeptides having modified peptide backbones.

[0033] The term “naturally-occurring” as used herein as applied to a nucleic acid, a protein, a cell, or an organism, refers to a nucleic acid, protein, cell, or organism that is found in nature. For example, a polypeptide or polynucleotide sequence that is present in an organism (including viruses) that can be isolated from a source in nature and which has not been intentionally modified by a human in the laboratory is naturally occurring.

[0034] By “cleavage domain” or “active domain” or “nuclease domain” of a nuclease it is meant the polypeptide sequence or domain within the nuclease which possesses the catalytic activity for nucleic acid cleavage. A cleavage domain can be contained in a single polypeptide chain or cleavage activity can result from the association of two (or more) polypeptides. A single nuclease domain may consist of more than one isolated stretch of amino acids within a given polypeptide (e.g., RuvCI, RuvCII, and RuvCIII of a Cas9 protein).

[0035] As used herein the term “isolated” is meant to describe a polynucleotide, a polypeptide, or a cell that is in an environment different from that in which the polynucleotide, the polypeptide, or the cell naturally occurs. An isolated genetically modified host cell may be present in a mixed population of genetically modified host cells.

[0036] “Heterologous,” as used herein, means a nucleotide or polypeptide sequence that is not found in the native nucleic acid or protein, respectively. For example, a variant Cas9 protein can be a chimeric variant Cas9 protein that includes a heterologous amino acid sequence (e.g., a fusion partner). Thus, a subject variant Cas9 protein can be a chimeric variant Cas9 protein that includes: (i) a variant Cas9 protein (e.g., in some cases having a disrupted RuvC and/or HNH domain) and (ii) a non-Cas9 polypeptide (where the non-Cas9 polypeptide can be referred to as a fusion partner). For example, a variant Cas9 protein can be a chimeric Cas9 protein that includes a variant Cas9 protein fused to a non-Cas9 polypeptide (where the non-Cas9 polypeptide can be referred to as a fusion partner). In some cases, a variant Cas9 protein can be a chimeric variant Cas9 protein that includes (a) a variant Cas9 protein fused to (b) a portion of a another Cas9 protein (e.g., a domain or region of a Cas9 protein that is different from the Cas9 protein of portion (a), e.g., the Cas9 protein of portion (a) can be from a different species than the Cas9 protein of portion (b)).

[0037] As used herein, the term “exogenous nucleic acid” refers to a nucleic acid that is not normally or naturally found in and/or produced by a given bacterium, organism, or cell in nature. As used herein, the term “endogenous nucleic acid” refers to a nucleic acid that is normally found in and/or produced by a given bacterium, organism, or cell in nature. An “endogenous nucleic acid” is also referred to as a “native nucleic acid” or a nucleic acid that is “native” to a given bacterium, organism, or cell.

[0038] “Recombinant,” as used herein, means that a particular nucleic acid (DNA or RNA) or protein is the product of various combinations of cloning, restriction, and/or ligation steps resulting in a construct having a structural coding or non-coding sequence distinguishable from endogenous nucleic acids found in natural systems. Generally, DNA sequences encoding the structural coding sequence can be assembled from cDNA fragments and short oligonucleotide linkers, or from a series of synthetic oligonucleotides, to provide a synthetic nucleic acid which is capable of being expressed from a recombinant transcriptional unit contained in a cell or in a cell-free transcription and translation system. Such sequences can be provided in the form of an open reading frame uninterrupted by internal non-translated sequences, or introns, which are typically present in eukaryotic genes. Genomic DNA comprising the relevant sequences can also be used in the formation of a recombinant gene or transcriptional unit. Sequences of non-translated DNA may be present 5′ or 3′ from the open reading frame, where such sequences do not interfere with manipulation or expression of the coding regions, and may indeed act to modulate production of a desired product by various mechanisms (see “DNA regulatory sequences”, below).

[0039] Thus, e.g., the term “recombinant” polynucleotide or “recombinant” nucleic acid refers to one which is not naturally occurring, e.g., is made by the artificial combination of two otherwise separated segments of sequence through human intervention. This artificial combination is often accomplished by either chemical synthesis means, or by the artificial manipulation of isolated segments of nucleic acids, e.g., by genetic engineering techniques. Such is usually done to replace a codon with a redundant codon encoding the same or a conservative amino acid, while typically introducing or removing a sequence recognition site. Alternatively, it is performed to join together nucleic acid segments of desired functions to generate a desired combination of functions. This artificial combination is often accomplished by either chemical synthesis means, or by the artificial manipulation of isolated segments of nucleic acids, e.g., by genetic engineering techniques.

[0040] Similarly, the term “recombinant” polypeptide refers to a polypeptide which is not naturally occurring, e.g., is made by the artificial combination of two otherwise separated segments of amino sequence through human intervention. Thus, e.g., a polypeptide that comprises a heterologous amino acid sequence is recombinant.

[0041] By “construct” or “vector” is meant a recombinant nucleic acid, generally recombinant DNA, which has been generated for the purpose of the expression and/or propagation of a nucleotide sequence(s) of interest, or is to be used in the construction of other recombinant nucleotide sequences.

[0042] The terms “DNA regulatory sequences,” “control elements,” and “regulatory elements,” used interchangeably herein, refer to transcriptional and translational control sequences, such as promoters, enhancers, polyadenylation signals, terminators, protein degradation signals, and the like, that provide for and/or regulate expression of a coding sequence and/or production of an encoded polypeptide in a host cell. As used herein, a “promoter sequence” or “promoter” is a DNA regulatory region capable of binding/recruiting RNA polymerase (e.g., via a transcription initiation complex) and initiating transcription of a downstream (3′ direction) sequence (e.g., a protein coding (“coding”) or non protein-coding (“non-coding”) sequence. A promoter can be any convenient promoter (e.g., a T7 promoter). In some cases, a promoter is a constitutively active promoter (e.g., a promoter that is constitutively in an active/“ON” state), it may be an inducible promoter (e.g., a promoter whose state, active/“ON” or inactive/“OFF”, is controlled by an external stimulus, e.g., the presence of a particular temperature, compound, or protein), it may be a spatially restricted promoter (e.g., tissue specific promoter, cell type specific promoter, etc.), and/or it may be a temporally restricted promoter (e.g., the promoter is in the “ON” state or “OFF” state during specific stages of embryonic development or during specific stages of a biological process, e.g., hair follicle cycle in mice).

[0043] “Operably linked” refers to a juxtaposition wherein the components so described are in a relationship permitting them to function in their intended manner. For instance, a promoter is operably linked to a nucleotide sequence (e.g., a protein coding sequence, e.g., a sequence encoding an mRNA; a non protein coding sequence, e.g., a sequence encoding a non-coding RNA (ncRNA) such as a Cas9 guide RNA, a targeter RNA, an activator RNA; and the like) if the promoter affects its transcription and/or expression. The relationship can also be referred to in the reverse and retain the same meaning. For example, a nucleotide sequence of interest can be said to be operably linked to a promoter. As used herein, the terms “heterologous promoter” and “heterologous control regions” refer to promoters and other control regions that are not normally associated with a particular nucleic acid in nature. For example, a “transcriptional control region heterologous to a coding region” is a transcriptional control region that is not normally associated with the coding region in nature.

[0044] A “host cell,” as used herein, denotes an in vivo or in vitro eukaryotic cell, a prokaryotic cell, or a cell from a multicellular organism (e.g., a cell line) cultured as a unicellular entity, which eukaryotic or prokaryotic cells can be, or have been, used as recipients for a nucleic acid (e.g., an expression vector that comprises a nucleotide sequence of interest), and include the progeny of the original cell which has been genetically modified by the nucleic acid. It is understood that the progeny of a single cell may not necessarily be completely identical in morphology or in genomic or total DNA complement as the original parent, due to natural, accidental, or deliberate mutation. A “recombinant host cell” (also referred to as a “genetically modified host cell”) is a host cell into which has been introduced a heterologous nucleic acid, e.g., an expression vector. For example, a subject prokaryotic host cell is a genetically modified prokaryotic host cell (e.g., a bacterium), by virtue of introduction into a suitable prokaryotic host cell of a heterologous nucleic acid, e.g., an exogenous nucleic acid that is foreign to (not normally found in nature in) the prokaryotic host cell, or a recombinant nucleic acid that is not normally found in the prokaryotic host cell; and a subject eukaryotic host cell is a genetically modified eukaryotic host cell, by virtue of introduction into a suitable eukaryotic host cell of a heterologous nucleic acid, e.g., an exogenous nucleic acid that is foreign to the eukaryotic host cell, or a recombinant nucleic acid that is not normally found in the eukaryotic host cell.

[0045] The term “conservative amino acid substitution” refers to the interchangeability in proteins of amino acid residues having similar side chains. For example, a group of amino acids having aliphatic side chains consists of glycine, alanine, valine, leucine, and isoleucine; a group of amino acids having aliphatic-hydroxyl side chains consists of serine and threonine; a group of amino acids having amide-containing side chains consists of asparagine and glutamine; a group of amino acids having aromatic side chains consists of phenylalanine, tyrosine, and tryptophan; a group of amino acids having basic side chains consists of lysine, arginine, and histidine; and a group of amino acids having sulfur-containing side chains consists of cysteine and methionine. Exemplary conservative amino acid substitution groups are: valine-leucine-isoleucine, phenylalanine-tyrosine, lysine-arginine, alanine-valine, and asparagine-glutamine.

[0046] A polynucleotide or polypeptide has a certain percent “sequence identity” to another polynucleotide or polypeptide, meaning that, when aligned, that percentage of bases or amino acids are the same, and in the same relative position, when comparing the two sequences. Sequence similarity can be determined in a number of different manners. To determine sequence identity, sequences can be aligned using the methods and computer programs, including BLAST, available over the world wide web at ncbi.nlm.nih.gov/BLAST. See, e.g., Altschul et al. (1990), J. Mol. Biol. 215:403-10. Another alignment algorithm is FASTA, available in the Genetics Computing Group (GCG) package, from Madison, Wis., USA, a wholly owned subsidiary of Oxford Molecular Group, Inc. Other techniques for alignment are described in Methods in Enzymology, vol. 266: Computer Methods for Macromolecular Sequence Analysis (1996), ed. Doolittle, Academic Press, Inc., a division of Harcourt Brace & Co., San Diego, Calif., USA. Of particular interest are alignment programs that permit gaps in the sequence. The Smith-Waterman is one type of algorithm that permits gaps in sequence alignments. See Meth. Mol. Biol. 70: 173-187 (1997). Also, the GAP program using the Needleman and Wunsch alignment method can be utilized to align sequences. See J. Mol. Biol. 48: 443-453 (1970).

[0047] “Binding” as used herein (e.g. with reference to binding between an RNA and a protein, e.g., via an RNA-binding domain of a polypeptide) refers to a non-covalent interaction between macromolecules (e.g., between a protein and a nucleic acid). While in a state of non-covalent interaction, the macromolecules are said to be “associated” or “interacting” or “binding” (e.g., when a molecule X is said to interact with a molecule Y, it is meant the molecule X binds to molecule Y in a non-covalent manner). Not all components of a binding interaction need be sequence-specific (e.g., contacts with phosphate residues in a DNA backbone), but some portions of a binding interaction may be sequence-specific. Binding interactions are generally characterized by a dissociation constant (Kd) of less than 10⁻⁶ M, less than 10⁻⁷ M, less than 10⁻⁸ M, less than 10⁻⁹ M, less than 10⁻¹⁰ M, less than 10⁻¹¹ M, less than 10⁻¹² M, less than 10⁻¹³ M, less than 10⁻¹⁴ M, or less than 10⁻¹⁵ M. “Affinity” refers to the strength of binding, increased binding affinity being correlated with a lower Kd.

[0048] By “binding domain” it is meant a protein domain that is able to bind non-covalently to another molecule. A binding domain can bind to, for example, a DNA molecule (a DNA-binding protein), an RNA molecule (an RNA-binding protein) and/or a protein molecule (a protein-binding protein). In the case of a protein domain-binding protein, it can bind to itself (to form homodimers, homotrimers, etc.) and/or it can bind to one or more molecules of a different protein or proteins.

[0049] Before the present invention is further described, it is to be understood that this invention is not limited to particular embodiments described, as such may, of course, vary. It is also to be understood that the terminology used herein is for the purpose of describing particular embodiments only, and is not intended to be limiting, since the scope of the present invention will be limited only by the appended claims.

[0050] Where a range of values is provided, it is understood that each intervening value, to the tenth of the unit of the lower limit unless the context clearly dictates otherwise, between the upper and lower limit of that range and any other stated or intervening value in that stated range, is encompassed within the invention. The upper and lower limits of these smaller ranges may independently be included in the smaller ranges, and are also encompassed within the invention, subject to any specifically excluded limit in the stated range. Where the stated range includes one or both of the limits, ranges excluding either or both of those included limits are also included in the invention.

[0051] Unless defined otherwise, all technical and scientific terms used herein have the same meaning as commonly understood by one of ordinary skill in the art to which this invention belongs. Although any methods and materials similar or equivalent to those described herein can also be used in the practice or testing of the present invention, the preferred methods and materials are now described. All publications mentioned herein are incorporated herein by reference to disclose and describe the methods and/or materials in connection with which the publications are cited.

[0052] It must be noted that as used herein and in the appended claims, the singular forms “a,” “an,” and “the” include plural referents unless the context clearly dictates otherwise. Thus, for example, reference to “a protein” includes a plurality of such proteins and reference to “the nucleic acid” includes reference to one or more nucleic acids and equivalents thereof known to those skilled in the art, and so forth. It is further noted that the claims may be drafted to exclude any optional element. As such, this statement is intended to serve as antecedent basis for use of such exclusive terminology as “solely,” “only” and the like in connection with the recitation of claim elements, or use of a “negative” limitation.

[0053] It is appreciated that certain features of the invention, which are, for clarity, described in the context of separate embodiments, may also be provided in combination in a single embodiment. Conversely, various features of the invention, which are, for brevity, described in the context of a single embodiment, may also be provided separately or in any suitable sub-combination. All combinations of the embodiments pertaining to the invention are specifically embraced by the present invention and are disclosed herein just as if each and every combination was individually and explicitly disclosed. In addition, all sub-combinations of the various embodiments and elements thereof are also specifically embraced by the present invention and are disclosed herein just as if each and every such sub-combination was individually and explicitly disclosed herein.

[0054] The publications discussed herein are provided solely for their disclosure prior to the filing date of the present application. Nothing herein is to be construed as an admission that the present invention is not entitled to antedate such publication by virtue of prior invention. Further, the dates of publication provided may be different from the actual publication dates which may need to be independently confirmed.

### DETAILED DESCRIPTION

[0055] The present disclosure provides methods, kits, and compositions for generating DNA molecules encoding CRISPR/Cas guide RNAs (e.g., Cas9 single guide RNAs or Cas9 targeter RNAs). A library of such DNA molecules can be generated from any DNA source. The methods include a step of contacting target DNA with one or more DNA endonucleases that specifically bind to and cleave within a recognition sequence that includes a PAM sequence, to generate a plurality of cleavage fragments, to which a DNA adapter can be attached. A distal-cleaving DNA endonuclease can be used that specifically binds to a recognition sequence in the DNA adapter and cleaves at a site within the attached DNA cleavage fragments to generate a library of CRISPR/Cas guide sequences. After removal of all or a portion of the DNA adapter, a constant region of a guide RNA can be attached to generate DNA molecules encoding CRISPR/Cas guide RNAs.

[0056] Compositions and Methods

[0057] Cas9 Protein (Cas9)

[0058] A Cas9 guide RNA and a Cas9 protein form a complex. The guide RNA provides target specificity to the complex by having a nucleotide sequence that is complementary to a sequence (the target site) of a target nucleic acid (as noted above). The Cas9 protein of the complex provides the site-specific activity. In other words, the Cas9 protein is guided to a target site (e.g., stabilized at a target site) within a target nucleic acid sequence (e.g. a chromosomal sequence or an extrachromosomal sequence, e.g. an episomal sequence, a minicircle sequence, a mitochondrial sequence, a chloroplast sequence, etc.) by virtue of its association with the protein-binding segment of the Cas9 guide RNA.

[0059] A Cas9 protein can bind and/or modify (e.g., cleave, nick, methylate, demethylate, etc.) a target nucleic acid and/or a polypeptide associated with target nucleic acid (e.g., methylation or acetylation of a histone tail)(e.g., when the Cas9 protein includes a fusion partner with an activity). In some cases, the Cas9 protein is a naturally-occurring protein (e.g, naturally occurs in bacterial and/or archaeal cells). In other cases, the Cas9 protein is not a naturally-occurring polypeptide (e.g., the Cas9 protein is a variant Cas9 protein, a chimeric protein, and the like).

[0060] Examples of suitable Cas9 proteins include, but are not limited to, those set forth in SEQ ID NOs: 15-826. Naturally occurring Cas9 proteins bind a Cas9 guide RNA, are thereby directed to a specific sequence within a target nucleic acid (a target site), and cleave the target nucleic acid (e.g., cleave dsDNA to generate a double strand break, cleave ssDNA, cleave ssRNA, etc.). A chimeric Cas9 protein (a Cas9 fusion protein) is a fusion protein that is fused to a heterologous protein. The fusion partner can provide an activity, e.g., enzymatic activity (e.g., nuclease activity, activity for DNA and/or RNA methylation, activity for DNA and/or RNA cleavage, activity for histone acetylation, activity for histone methylation, activity for RNA modification, activity for RNA-binding, activity for RNA splicing etc.). In some cases a portion of the Cas9 protein (e.g., the RuvC domain and/or the HNH domain) exhibits reduced nuclease activity relative to the corresponding portion of a wild type Cas9 protein (e.g., in some cases the Cas9 protein is a nickase). In some cases, the Cas9 protein is enzymatically inactive.

[0061] Assays to determine whether given protein interacts with a Cas9 guide RNA can be any convenient binding assay that tests for binding between a protein and a nucleic acid. Suitable binding assays (e.g., gel shift assays) will be know to one of ordinary skill in the art (e.g., assays that include adding a Cas9 guide RNA and a protein to a target nucleic acid).

[0062] Assays to determine whether a protein has an activity (e.g., to determine if the protein has nuclease activity that cleaves a target nucleic acid and/or some heterologous activity) can be any convenient assay (e.g., any convenient nucleic acid cleavage assay that tests for nucleic acid cleavage). Suitable assays (e.g., cleavage assays) will be known to one of ordinary skill in the art and can include adding a Cas9 guide RNA and a protein to a target nucleic acid.

[0063] In some cases, a Cas9 protein (e.g., a chimeric Cas9 protein) has enzymatic activity that modifies target nucleic acid (e.g., nuclease activity, methyltransferase activity, demethylase activity, DNA repair activity, DNA damage activity, deamination activity, dismutase activity, alkylation activity, depurination activity, oxidation activity, pyrimidine dimer forming activity, integrase activity, transposase activity, recombinase activity, polymerase activity, ligase activity, helicase activity, photolyase activity or glycosylase activity).

[0064] In other cases, a Cas9 protein (e.g., a chimeric Cas9 protein) has enzymatic activity that modifies a polypeptide (e.g., a histone) associated with target nucleic acid (e.g., methyltransferase activity, demethylase activity, acetyltransferase activity, deacetylase activity, kinase activity, phosphatase activity, ubiquitin ligase activity, deubiquitinating activity, adenylation activity, deadenylation activity, SUMOylating activity, deSUMOylating activity, ribosylation activity, deribosylation activity, myristoylation activity or demyristoylation activity).

[0065] Many Cas9 orthologs from a wide variety of species have been identified and the proteins share only a few identical amino acids. Identified Cas9 orthologs have similar domain architecture with a central HNH endonuclease domain and a split RuvC/RNaseH domain (e.g., RuvCI, RuvCII, and RuvCIII). Cas9 proteins share 4 key motifs with a conserved architecture. Motifs 1, 2, and 4 are RuvC like motifs while motif 3 is an HNH-motif. In some cases, a suitable Cas9 protein comprises an amino acid sequence having 4 motifs, each of motifs 1-4 having 60% or more, 70% or more, 75% or more, 80% or more, 85% or more, 90% or more, 95% or more, 99% or more or 100% amino acid sequence identity to motifs 1-4 of the Cas9 amino acid sequence set forth as SEQ ID NO:22 (the motifs are in Table 4, below, and are set forth as SEQ ID NOs: 827-830, respectively), or to the corresponding portions in any of the amino acid sequences set forth in SEQ ID NOs:15-826.

[0066] In some cases, a suitable Cas9 protein comprises an amino acid sequence having 4 motifs, each of motifs 1-4 having 60% or more amino acid sequence identity to motifs 1-4 of the Cas9 amino acid sequence set forth as SEQ ID NO: 22 (the motifs are in Table 4, below, and are set forth as SEQ ID NOs: 827-830, respectively), or to the corresponding portions in any of the amino acid sequences set forth in SEQ ID NOs:15-826.

[0067] In some cases, a suitable Cas9 protein comprises an amino acid sequence having 4 motifs, each of motifs 1-4 having 70% or more amino acid sequence identity to motifs 1-4 of the Cas9 amino acid sequence set forth as SEQ ID NO: 22 (the motifs are in Table 4, below, and are set forth as SEQ ID NOs: 827-830, respectively), or to the corresponding portions in any of the amino acid sequences set forth in SEQ ID NOs:15-826.

[0068] In some cases, a suitable Cas9 protein comprises an amino acid sequence having 4 motifs, each of motifs 1-4 having 75% or more amino acid sequence identity to motifs 1-4 of the Cas9 amino acid sequence set forth as SEQ ID NO: 22 (the motifs are in Table 4, below, and are set forth as SEQ ID NOs: 827-830, respectively), or to the corresponding portions in any of the amino acid sequences set forth in SEQ ID NOs:15-826.

[0069] In some cases, a suitable Cas9 protein comprises an amino acid sequence having 4 motifs, each of motifs 1-4 having 80% or more amino acid sequence identity to motifs 1-4 of the Cas9 amino acid sequence set forth as SEQ ID NO: 22 (the motifs are in Table 4, below, and are set forth as SEQ ID NOs: 827-830, respectively), or to the corresponding portions in any of the amino acid sequences set forth in SEQ ID NOs:15-826.

[0070] In some cases, a suitable Cas9 protein comprises an amino acid sequence having 4 motifs, each of motifs 1-4 having 85% or more amino acid sequence identity to motifs 1-4 of the Cas9 amino acid sequence set forth as SEQ ID NO: 22 (the motifs are in Table 4, below, and are set forth as SEQ ID NOs: 827-830, respectively), or to the corresponding portions in any of the amino acid sequences set forth in SEQ ID NOs:15-826.

[0071] In some cases, a suitable Cas9 protein comprises an amino acid sequence having 4 motifs, each of motifs 1-4 having 90% or more amino acid sequence identity to motifs 1-4 of the Cas9 amino acid sequence set forth as SEQ ID NO: 22 (the motifs are in Table 4, below, and are set forth as SEQ ID NOs: 827-830, respectively), or to the corresponding portions in any of the amino acid sequences set forth in SEQ ID NOs:15-826.

[0072] In some cases, a suitable Cas9 protein comprises an amino acid sequence having 4 motifs, each of motifs 1-4 having 95% or more amino acid sequence identity to motifs 1-4 of the Cas9 amino acid sequence set forth as SEQ ID NO: 22 (the motifs are in Table 4, below, and are set forth as SEQ ID NOs: 827-830, respectively), or to the corresponding portions in any of the amino acid sequences set forth in SEQ ID NOs:15-826.

[0073] In some cases, a suitable Cas9 protein comprises an amino acid sequence having 4 motifs, each of motifs 1-4 having 99% or more amino acid sequence identity to motifs 1-4 of the Cas9 amino acid sequence set forth as SEQ ID NO: 22 (the motifs are in Table 4, below, and are set forth as SEQ ID NOs: 827-830, respectively), or to the corresponding portions in any of the amino acid sequences set forth in SEQ ID NOs:15-826.

[0074] In some cases, a suitable Cas9 protein comprises an amino acid sequence having 4 motifs, each of motifs 1-4 having 100% amino acid sequence identity to motifs 1-4 of the Cas9 amino acid sequence set forth as SEQ ID NO: 22 (the motifs are in Table 4, below, and are set forth as SEQ ID NOs: 827-830, respectively), or to the corresponding portions in any of the amino acid sequences set forth in SEQ ID NOs:15-826.

[0075] In some cases, a suitable Cas9 protein comprises an amino acid sequence having 60% or more, 70% or more, 75% or more, 80% or more, 85% or more, 90% or more, 95% or more, 99% or more or 100% amino acid sequence identity to amino acids 7-166 or 731-1003 of the Cas9 amino acid sequence set forth in SEQ ID NO: 22, or to the corresponding portions in any of the amino acid sequences set forth as SEQ ID NOs:15-826. Any Cas9 protein can be used as part of a chimeric Cas9 protein of the subject methods.

[0076] In some cases, a suitable Cas9 protein comprises an amino acid sequence having 60% or more amino acid sequence identity to amino acids 7-166 or 731-1003 of the Cas9 amino acid sequence set forth in SEQ ID NO: 22, or to the corresponding portions in any of the amino acid sequences set forth as SEQ ID NOs:15-826. Any Cas9 protein can be used as part of a chimeric Cas9 protein of the subject methods.

[0077] In some cases, a suitable Cas9 protein comprises an amino acid sequence having 70% or more amino acid sequence identity to amino acids 7-166 or 731-1003 of the Cas9 amino acid sequence set forth in SEQ ID NO: 22, or to the corresponding portions in any of the amino acid sequences set forth as SEQ ID NOs:15-826. Any Cas9 protein can be used as part of a chimeric Cas9 protein of the subject methods.

[0078] In some cases, a suitable Cas9 protein comprises an amino acid sequence having 75% or more amino acid sequence identity to amino acids 7-166 or 731-1003 of the Cas9 amino acid sequence set forth in SEQ ID NO: 22, or to the corresponding portions in any of the amino acid sequences set forth as SEQ ID NOs:15-826. Any Cas9 protein can be used as part of a chimeric Cas9 protein of the subject methods.

[0079] In some cases, a suitable Cas9 protein comprises an amino acid sequence having 80% or more amino acid sequence identity to amino acids 7-166 or 731-1003 of the Cas9 amino acid sequence set forth in SEQ ID NO: 22, or to the corresponding portions in any of the amino acid sequences set forth as SEQ ID NOs:15-826. Any Cas9 protein can be used as part of a chimeric Cas9 protein of the subject methods.

[0080] In some cases, a suitable Cas9 protein comprises an amino acid sequence having 85% or more amino acid sequence identity to amino acids 7-166 or 731-1003 of the Cas9 amino acid sequence set forth in SEQ ID NO: 22, or to the corresponding portions in any of the amino acid sequences set forth as SEQ ID NOs:15-826. Any Cas9 protein can be used as part of a chimeric Cas9 protein of the subject methods.

[0081] In some cases, a suitable Cas9 protein comprises an amino acid sequence having 90% or more amino acid sequence identity to amino acids 7-166 or 731-1003 of the Cas9 amino acid sequence set forth in SEQ ID NO: 22, or to the corresponding portions in any of the amino acid sequences set forth as SEQ ID NOs:15-826. Any Cas9 protein can be used as part of a chimeric Cas9 protein of the subject methods.

[0082] In some cases, a suitable Cas9 protein comprises an amino acid sequence having 95% or more amino acid sequence identity to amino acids 7-166 or 731-1003 of the Cas9 amino acid sequence set forth in SEQ ID NO: 22, or to the corresponding portions in any of the amino acid sequences set forth as SEQ ID NOs:15-826. Any Cas9 protein can be used as part of a chimeric Cas9 protein of the subject methods.

[0083] In some cases, a suitable Cas9 protein comprises an amino acid sequence having 99% or more amino acid sequence identity to amino acids 7-166 or 731-1003 of the Cas9 amino acid sequence set forth in SEQ ID NO: 22, or to the corresponding portions in any of the amino acid sequences set forth as SEQ ID NOs:15-826. Any Cas9 protein can be used as part of a chimeric Cas9 protein of the subject methods.

[0084] In some cases, a suitable Cas9 protein comprises an amino acid sequence having 100% amino acid sequence identity to amino acids 7-166 or 731-1003 of the Cas9 amino acid sequence set forth in SEQ ID NO: 22, or to the corresponding portions in any of the amino acid sequences set forth as SEQ ID NOs:15-826. Any Cas9 protein can be used as part of a chimeric Cas9 protein of the subject methods.

[0085] In some cases, a suitable Cas9 protein comprises an amino acid sequence having 60% or more, 70% or more, 75% or more, 80% or more, 85% or more, 90% or more, 95% or more, 99% or more or 100% amino acid sequence identity to the Cas9 amino acid sequence set forth in SEQ ID NO: 22, or to any of the amino acid sequences set forth as SEQ ID NOs:15-826. Any Cas9 protein can be used as part of a chimeric Cas9 protein of the subject methods.

[0086] In some cases, a suitable Cas9 protein comprises an amino acid sequence having 60% or more amino acid sequence identity to the Cas9 amino acid sequence set forth in SEQ ID NO: 22, or to any of the amino acid sequences set forth as SEQ ID NOs:15-826. Any Cas9 protein can be used as part of a chimeric Cas9 protein for use in a subject method.

[0087] In some cases, a suitable Cas9 protein comprises an amino acid sequence having 70% or more amino acid sequence identity to the Cas9 amino acid sequence set forth in SEQ ID NO: 22, or to any of the amino acid sequences set forth as SEQ ID NOs:15-826. Any Cas9 protein can be used as part of a chimeric Cas9 protein of the subject methods.

[0088] In some cases, a suitable Cas9 protein comprises an amino acid sequence having 75% or more amino acid sequence identity to the Cas9 amino acid sequence set forth in SEQ ID NO: 22, or to any of the amino acid sequences set forth as SEQ ID NOs:15-826. Any Cas9 protein can be used as part of a chimeric Cas9 protein of the subject methods.

[0089] In some cases, a suitable Cas9 protein comprises an amino acid sequence having 80% or more amino acid sequence identity to the Cas9 amino acid sequence set forth in SEQ ID NO: 22, or to any of the amino acid sequences set forth as SEQ ID NOs:15-826. Any Cas9 protein can be used as part of a chimeric Cas9 protein of the subject methods.

[0090] In some cases, a suitable Cas9 protein comprises an amino acid sequence having 85% or more amino acid sequence identity to the Cas9 amino acid sequence set forth in SEQ ID NO: 22, or to any of the amino acid sequences set forth as SEQ ID NOs:15-826. Any Cas9 protein can be used as part of a chimeric Cas9 protein of the subject methods.

[0091] In some cases, a suitable Cas9 protein comprises an amino acid sequence having 90% or more amino acid sequence identity to the Cas9 amino acid sequence set forth in SEQ ID NO: 22, or to any of the amino acid sequences set forth as SEQ ID NOs:15-826. Any Cas9 protein can be used as part of a chimeric Cas9 protein of the subject methods.

[0092] In some cases, a suitable Cas9 protein comprises an amino acid sequence having 95% or more amino acid sequence identity to the Cas9 amino acid sequence set forth in SEQ ID NO: 22, or to any of the amino acid sequences set forth as SEQ ID NOs:15-826. Any Cas9 protein can be used as part of a chimeric Cas9 protein of the subject methods.

[0093] In some cases, a suitable Cas9 protein comprises an amino acid sequence having 99% or more amino acid sequence identity to the Cas9 amino acid sequence set forth in SEQ ID NO: 22, or to any of the amino acid sequences set forth as SEQ ID NOs:15-826. Any Cas9 protein can be used as part of a chimeric Cas9 protein of the subject methods.

[0094] In some cases, a suitable Cas9 protein comprises an amino acid sequence having 100% amino acid sequence identity to the Cas9 amino acid sequence set forth in SEQ ID NO: 22, or to any of the amino acid sequences set forth as SEQ ID NOs:15-826. Any Cas9 protein can be used as part of a chimeric Cas9 protein of the subject methods.

[0095] In some cases, a Cas9 protein comprises 4 motifs (as listed in Table 4), at least one with (or each with) amino acid sequences having 75% or more, 80% or more, 85% or more, 90% or more, 95% or more, 99% or more or 100% amino acid sequence identity to each of the 4 motifs listed in Table 4 (SEQ ID NOs:827-830), or to the corresponding portions in any of the amino acid sequences set forth as SEQ ID NOs:15-826.

[0096] As used herein, the term “Cas9 protein” encompasses the term “variant Cas9 protein”; and the term “variant Cas9 protein” encompasses the term “chimeric Cas9 protein” (or “Cas9 fusion protein”).

[0097] Variant Cas9 Proteins

[0098] A variant Cas9 protein has an amino acid sequence that is different by one amino acid (e.g., has a deletion, insertion, substitution, fusion) (i.e., different by at least one amino acid) when compared to the amino acid sequence of a wild type Cas9 protein. In some instances, the variant Cas9 protein has an amino acid change (e.g., deletion, insertion, or substitution) that reduces the nuclease activity of the Cas9 protein. For example, in some instances, the variant Cas9 protein has 50% or less, 40% or less, 30% or less, 20% or less, 10% or less, 5% or less, or 1% or less of the nuclease activity of the corresponding wild-type Cas9 protein. In some cases, the variant Cas9 protein has no substantial nuclease activity. When a Cas9 protein is a variant Cas9 protein that has no substantial nuclease activity, it can be referred to as “dCas9.”

[0099] In some cases, a variant Cas9 protein can cleave the complementary strand of a target nucleic acid but has reduced ability to cleave the non-complementary strand of a target nucleic acid. For example, the variant Cas9 protein can have a mutation (amino acid substitution) that reduces the function of the RuvC domain. As a non-limiting example, in some embodiments, a variant Cas9 protein has a mutation at residue D10 (e.g., D10A, aspartate to alanine) of SEQ ID NO: 22 or of SEQ ID NO: 826 (or the corresponding position of any of the proteins set forth in SEQ ID NOs:15-826) and can therefore cleave the complementary strand of a double stranded target nucleic acid but has reduced ability to cleave the non-complementary strand of a double stranded target nucleic acid (thus resulting in a single strand break (SSB) instead of a double strand break (DSB) when the variant Cas9 protein cleaves a double stranded target nucleic acid) (see, for example, Jinek et al., Science. 2012 Aug. 17; 337(6096):816-21).

[0100] In some cases, a variant Cas9 protein can cleave the non-complementary strand of a target nucleic acid but has reduced ability to cleave the complementary strand of the target nucleic acid. For example, the variant Cas9 protein can have a mutation (amino acid substitution) that reduces the function of the HNH domain. Thus, the Cas9 protein can be a nickase that cleaves the non-complementary strand, but does not cleave the complementary strand (e.g., does not cleave a single stranded target nucleic acid). As a non-limiting example, in some embodiments, the variant Cas9 protein has a mutation at position H840 (e.g., an H840A mutation, histidine to alanine) of SEQ ID NO: 22 or at the corresponding position H839 (e.g., H839A) of SEQ ID NO: 826 (or the corresponding position of any of the proteins set forth as SEQ ID NOs:15-826) and can therefore cleave the non-complementary strand of the target nucleic acid but has reduced ability to cleave (e.g., does not cleave) the complementary strand of the target nucleic acid. Such a Cas9 protein has a reduced ability to cleave a target nucleic acid (e.g., a single stranded target nucleic acid).

[0101] In some cases, a variant Cas9 protein has a reduced ability to cleave both the complementary and the non-complementary strands of a double stranded target nucleic acid. As a non-limiting example, in some cases, the variant Cas9 protein harbors mutations at residues D10 and H840 (e.g., D10A and H840A) of SEQ ID NO: 22 or D10 and H839 of SEQ ID NO: 826 (or the corresponding residues of any of the proteins set forth as SEQ ID NOs:15-826) such that the polypeptide has a reduced ability to cleave (e.g., does not cleave) both the complementary and the non-complementary strands of a target nucleic acid. Such a Cas9 protein has a reduced ability to cleave a target nucleic acid (e.g., a single stranded or double stranded target nucleic acid) but retains the ability to bind a target nucleic acid.

[0102] In addition to the above, a variant Cas9 protein can have the same parameters for sequence identity as described above for Cas9 proteins. Thus, in some cases, a suitable variant Cas9 protein comprises an amino acid sequence having 4 motifs, each of motifs 1-4 having 60% or more, 70% or more, 75% or more, 80% or more, 85% or more, 90% or more, 95% or more, 99% or more or 100% amino acid sequence identity to motifs 1-4 of the Cas9 amino acid sequence set forth as SEQ ID NO: 22 (the motifs are in Table 4, below, and are set forth as SEQ ID NOs: 827-830, respectively), or to the corresponding portions in any of the amino acid sequences set forth in SEQ ID NOs:15-826.

[0103] In some cases, a suitable variant Cas9 protein comprises an amino acid sequence having 4 motifs, each of motifs 1-4 having 60% or more amino acid sequence identity to motifs 1-4 of the Cas9 amino acid sequence set forth as SEQ ID NO: 22 (the motifs are in Table 4, below, and are set forth as SEQ ID NOs: 827-830, respectively), or to the corresponding portions in any of the amino acid sequences set forth in SEQ ID NOs:15-826.

[0104] In some cases, a suitable variant Cas9 protein comprises an amino acid sequence having 4 motifs, each of motifs 1-4 having 70% or more amino acid sequence identity to motifs 1-4 of the Cas9 amino acid sequence set forth as SEQ ID NO: 22 (the motifs are in Table 4, below, and are set forth as SEQ ID NOs: 827-830, respectively), or to the corresponding portions in any of the amino acid sequences set forth in SEQ ID NOs:15-826.

[0105] In some cases, a suitable variant Cas9 protein comprises an amino acid sequence having 4 motifs, each of motifs 1-4 having 75% or more amino acid sequence identity to motifs 1-4 of the Cas9 amino acid sequence set forth as SEQ ID NO: 22 (the motifs are in Table 4, below, and are set forth as SEQ ID NOs: 827-830, respectively), or to the corresponding portions in any of the amino acid sequences set forth in SEQ ID NOs:15-826.

[0106] In some cases, a suitable variant Cas9 protein comprises an amino acid sequence having 4 motifs, each of motifs 1-4 having 80% or more amino acid sequence identity to motifs 1-4 of the Cas9 amino acid sequence set forth as SEQ ID NO: 22 (the motifs are in Table 4, below, and are set forth as SEQ ID NOs: 827-830, respectively), or to the corresponding portions in any of the amino acid sequences set forth in SEQ ID NOs:15-826.

[0107] In some cases, a suitable variant Cas9 protein comprises an amino acid sequence having 4 motifs, each of motifs 1-4 having 85% or more amino acid sequence identity to motifs 1-4 of the Cas9 amino acid sequence set forth as SEQ ID NO: 22 (the motifs are in Table 4, below, and are set forth as SEQ ID NOs: 827-830, respectively), or to the corresponding portions in any of the amino acid sequences set forth in SEQ ID NOs:15-826.

[0108] In some cases, a suitable variant Cas9 protein comprises an amino acid sequence having 4 motifs, each of motifs 1-4 having 90% or more amino acid sequence identity to motifs 1-4 of the Cas9 amino acid sequence set forth as SEQ ID NO: 22 (the motifs are in Table 4, below, and are set forth as SEQ ID NOs: 827-830, respectively), or to the corresponding portions in any of the amino acid sequences set forth in SEQ ID NOs:15-826.

[0109] In some cases, a suitable variant Cas9 protein comprises an amino acid sequence having 4 motifs, each of motifs 1-4 having 95% or more amino acid sequence identity to motifs 1-4 of the Cas9 amino acid sequence set forth as SEQ ID NO: 22 (the motifs are in Table 4, below, and are set forth as SEQ ID NOs: 827-830, respectively), or to the corresponding portions in any of the amino acid sequences set forth in SEQ ID NOs:15-826.

[0110] In some cases, a suitable variant Cas9 protein comprises an amino acid sequence having 4 motifs, each of motifs 1-4 having 99% or more amino acid sequence identity to motifs 1-4 of the Cas9 amino acid sequence set forth as SEQ ID NO: 22 (the motifs are in Table 4, below, and are set forth as SEQ ID NOs: 827-830, respectively), or to the corresponding portions in any of the amino acid sequences set forth in SEQ ID NOs:15-826.

[0111] In some cases, a suitable variant Cas9 protein comprises an amino acid sequence having 4 motifs, each of motifs 1-4 having 100% amino acid sequence identity to motifs 1-4 of the Cas9 amino acid sequence set forth as SEQ ID NO: 22 (the motifs are in Table 4, below, and are set forth as SEQ ID NOs: 827-830, respectively), or to the corresponding portions in any of the amino acid sequences set forth in SEQ ID NOs:15-826.

TABLE 4
Table 4 lists 4 motifs that are present in Cas9
sequences from various species

| Motif | | | Highly |
|---|---|---|---|
| # | Motif | Amino acids (residue #s) | conserved |
| 1 | RuvC- | IGLDIGTNSVGWAVI (7-21) | D10, G12, |
| | like I | (SEQ ID NO: 827) | G17 |
| 2 | RuvC- | IVIEMARE (759-766) | E762 |
| | like II | (SEQ ID NO: 828) | |
| 3 | HNH- | DVDHIVPQSFLKDDSIDNKVLTRS | H840, N854, |
| | motif | DKN (837-863) | N863 |
| | | (SEQ ID NO: 829) | |
| 4 | RuvC- | HHAHDAYL (982-989) | H982, H983, |
| | like II | (SEQ ID NO: 830) | A984, D986, |
| | | | A987 |

Amino acids listed in Table 4 are from the Cas9 from S. pyogenes (SEQ ID NO: 22).

[0112] In some cases, a suitable variant Cas9 protein comprises an amino acid sequence having 60% or more, 70% or more, 75% or more, 80% or more, 85% or more, 90% or more, 95% or more, 99% or more, or 100% amino acid sequence identity to amino acids 7-166 or 731-1003 of the Cas9 amino acid sequence set forth in SEQ ID NO: 22, or to the corresponding portions in any of the amino acid sequences set forth as SEQ ID NOs:15-826. Any Cas9 protein as defined above can be used as a variant Cas9 protein or as part of a chimeric variant Cas9 protein of the subject methods.

[0113] In some cases, a suitable variant Cas9 protein comprises an amino acid sequence having 60% or more amino acid sequence identity to amino acids 7-166 or 731-1003 of the Cas9 amino acid sequence set forth in SEQ ID NO: 22, or to the corresponding portions in any of the amino acid sequences set forth as SEQ ID NOs:15-826. Any Cas9 protein as defined above can be used as a variant Cas9 protein or as part of a chimeric variant Cas9 protein of the subject methods.

[0114] In some cases, a suitable variant Cas9 protein comprises an amino acid sequence having 70% or more amino acid sequence identity to amino acids 7-166 or 731-1003 of the Cas9 amino acid sequence set forth in SEQ ID NO: 22, or to the corresponding portions in any of the amino acid sequences set forth as SEQ ID NOs:15-826. Any Cas9 protein as defined above can be used as a variant Cas9 protein or as part of a chimeric variant Cas9 protein of the subject methods.

[0115] In some cases, a suitable variant Cas9 protein comprises an amino acid sequence having 75% or more amino acid sequence identity to amino acids 7-166 or 731-1003 of the Cas9 amino acid sequence set forth in SEQ ID NO: 22, or to the corresponding portions in any of the amino acid sequences set forth as SEQ ID NOs:15-826. Any Cas9 protein as defined above can be used as a variant Cas9 protein or as part of a chimeric variant Cas9 protein of the subject methods.

[0116] In some cases, a suitable variant Cas9 protein comprises an amino acid sequence having 80% or more amino acid sequence identity to amino acids 7-166 or 731-1003 of the Cas9 amino acid sequence set forth in SEQ ID NO: 22, or to the corresponding portions in any of the amino acid sequences set forth as SEQ ID NOs:15-826. Any Cas9 protein as defined above can be used as a variant Cas9 protein or as part of a chimeric variant Cas9 protein of the subject methods.

[0117] In some cases, a suitable variant Cas9 protein comprises an amino acid sequence having 85% or more amino acid sequence identity to amino acids 7-166 or 731-1003 of the Cas9 amino acid sequence set forth in SEQ ID NO: 22, or to the corresponding portions in any of the amino acid sequences set forth as SEQ ID NOs:15-826. Any Cas9 protein as defined above can be used as a variant Cas9 protein or as part of a chimeric variant Cas9 protein of the subject methods.

[0118] In some cases, a suitable variant Cas9 protein comprises an amino acid sequence having 90% or more amino acid sequence identity to amino acids 7-166 or 731-1003 of the Cas9 amino acid sequence set forth in SEQ ID NO: 22, or to the corresponding portions in any of the amino acid sequences set forth as SEQ ID NOs:15-826. Any Cas9 protein as defined above can be used as a variant Cas9 protein or as part of a chimeric variant Cas9 protein of the subject methods.

[0119] In some cases, a suitable variant Cas9 protein comprises an amino acid sequence having 95% or more amino acid sequence identity to amino acids 7-166 or 731-1003 of the Cas9 amino acid sequence set forth in SEQ ID NO: 22, or to the corresponding portions in any of the amino acid sequences set forth as SEQ ID NOs:15-826. Any Cas9 protein as defined above can be used as a variant Cas9 protein or as part of a chimeric variant Cas9 protein of the subject methods.

[0120] In some cases, a suitable variant Cas9 protein comprises an amino acid sequence having 99% or more amino acid sequence identity to amino acids 7-166 or 731-1003 of the Cas9 amino acid sequence set forth in SEQ ID NO: 22, or to the corresponding portions in any of the amino acid sequences set forth as SEQ ID NOs:15-826. Any Cas9 protein as defined above can be used as a variant Cas9 protein or as part of a chimeric variant Cas9 protein of the subject methods.

[0121] In some cases, a suitable variant Cas9 protein comprises an amino acid sequence having 100% amino acid sequence identity to amino acids 7-166 or 731-1003 of the Cas9 amino acid sequence set forth in SEQ ID NO: 22, or to the corresponding portions in any of the amino acid sequences set forth as SEQ ID NOs:15-826. Any Cas9 protein as defined above can be used as a variant Cas9 protein or as part of a chimeric variant Cas9 protein of the subject methods.

[0122] In some cases, a suitable variant Cas9 protein comprises an amino acid sequence having 60% or more, 70% or more, 75% or more, 80% or more, 85% or more, 90% or more, 95% or more, 99% or more, or 100% amino acid sequence identity to the Cas9 amino acid sequence set forth in SEQ ID NO: 22, or to any of the amino acid sequences set forth as SEQ ID NOs:15-826. Any Cas9 protein as defined above can be used as a variant Cas9 protein or as part of a chimeric variant Cas9 protein of the subject methods.

[0123] In some cases, a suitable variant Cas9 protein comprises an amino acid sequence having 60% or more amino acid sequence identity to the Cas9 amino acid sequence set forth in SEQ ID NO: 22, or to any of the amino acid sequences set forth as SEQ ID NOs:15-826. Any Cas9 protein as defined above can be used as a variant Cas9 protein or as part of a chimeric variant Cas9 protein of the subject methods.

[0124] In some cases, a suitable variant Cas9 protein comprises an amino acid sequence having 70% or more amino acid sequence identity to the Cas9 amino acid sequence set forth in SEQ ID NO: 22, or to any of the amino acid sequences set forth as SEQ ID NOs:15-826. Any Cas9 protein as defined above can be used as a variant Cas9 protein or as part of a chimeric variant Cas9 protein of the subject methods.

[0125] In some cases, a suitable variant Cas9 protein comprises an amino acid sequence having 75% or more amino acid sequence identity to the Cas9 amino acid sequence set forth in SEQ ID NO: 22, or to any of the amino acid sequences set forth as SEQ ID NOs:15-826. Any Cas9 protein as defined above can be used as a variant Cas9 protein or as part of a chimeric variant Cas9 protein of the subject methods.

[0126] In some cases, a suitable variant Cas9 protein comprises an amino acid sequence having 80% or more amino acid sequence identity to the Cas9 amino acid sequence set forth in SEQ ID NO: 22, or to any of the amino acid sequences set forth as SEQ ID NOs:15-826. Any Cas9 protein as defined above can be used as a variant Cas9 protein or as part of a chimeric variant Cas9 protein of the subject methods.

[0127] In some cases, a suitable variant Cas9 protein comprises an amino acid sequence having 85% or more amino acid sequence identity to the Cas9 amino acid sequence set forth in SEQ ID NO: 22, or to any of the amino acid sequences set forth as SEQ ID NOs:15-826. Any Cas9 protein as defined above can be used as a variant Cas9 protein or as part of a chimeric variant Cas9 protein of the subject methods.

[0128] In some cases, a suitable variant Cas9 protein comprises an amino acid sequence having 90% or more amino acid sequence identity to the Cas9 amino acid sequence set forth in SEQ ID NO: 22, or to any of the amino acid sequences set forth as SEQ ID NOs:15-826. Any Cas9 protein as defined above can be used as a variant Cas9 protein or as part of a chimeric variant Cas9 protein of the subject methods.

[0129] In some cases, a suitable variant Cas9 protein comprises an amino acid sequence having 95% or more amino acid sequence identity to the Cas9 amino acid sequence set forth in SEQ ID NO: 22, or to any of the amino acid sequences set forth as SEQ ID NOs:15-826. Any Cas9 protein as defined above can be used as a variant Cas9 protein or as part of a chimeric variant Cas9 protein of the subject methods.

[0130] In some cases, a suitable variant Cas9 protein comprises an amino acid sequence having 99% or more amino acid sequence identity to the Cas9 amino acid sequence set forth in SEQ ID NO: 22, or to any of the amino acid sequences set forth as SEQ ID NOs:15-826. Any Cas9 protein as defined above can be used as a variant Cas9 protein or as part of a chimeric variant Cas9 protein of the subject methods.

[0131] In some cases, a suitable variant Cas9 protein comprises an amino acid sequence having 100% amino acid sequence identity to the Cas9 amino acid sequence set forth in SEQ ID NO: 22, or to any of the amino acid sequences set forth as SEQ ID NOs:15-826. Any Cas9 protein as defined above can be used as a variant Cas9 protein or as part of a chimeric variant Cas9 protein of the subject methods.

[0132] As noted above, in some cases, the Cas9 protein is a chimeric Cas9 protein and is fused to a fusion partner. In some cases, the Cas9 portion of the chimeric Cas9 protein has one or more amino acid mutations that render the Cas9 portion to be a nickase or a dCas9 (e.g., as described above). The fusion partner can included any amino acid sequence that provide a desired property to the chimeric Cas9 protein. Thus, in some embodiments, a subject Cas9 protein is a variant Cas9 protein that is a chimeric Cas9 protein (also referred to herein as a fusion protein, e.g., a “Cas9 fusion protein”). A Cas9 fusion protein can bind and/or modify a target nucleic acid (e.g., cleave, methylate, demethylate, etc.). In some cases, a Cas9 fusion protein can modify a polypeptide associated with target nucleic acid (e.g., methylation, acetylation, etc., of, for example, a histone tail). For purposes of this disclosure, a “Cas9 fusion protein” is a subject variant Cas9 protein that is fused to a covalently linked heterologous polypeptide (also referred to as a “fusion partner”). In some cases, the heterologous protein exhibits (and therefore provides for) an activity (e.g., an enzymatic activity) that will also be exhibited by the Cas9 fusion protein (e.g., methyltransferase activity, acetyltransferase activity, kinase activity, ubiquitinating activity, etc.). When describing fusion partners, it is to be understood that fusion to the Cas9 protein can include fusion of an entire protein (an entire fusion partner protein) (e.g., an entire transcription activator or repressor protein); or can include fusion of a particular region and/or domain of the fusion partner to the Cas9 protein (e.g., fusion of a transcription activator or repressor domain from a fusion partner).

[0133] In some cases, the heterologous sequence provides for subcellular localization, i.e., the heterologous sequence is a subcellular localization sequence (e.g., a nuclear localization signal (NLS) for targeting to the nucleus, a sequence to keep the fusion protein out of the nucleus, e.g., a nuclear export sequence (NES), a sequence to keep the fusion protein retained in the cytoplasm, a mitochondrial localization signal for targeting to the mitochondria, a chloroplast localization signal for targeting to a chloroplast, an ER retention signal, and the like). In some embodiments, a Cas9 protein does not include a NLS so that the protein is not targeted to the nucleus (which can be advantageous, e.g., when the target nucleic acid is an RNA that is present in the cytosol). In some embodiments, the heterologous sequence can provide a tag (i.e., the heterologous sequence is a detectable label) for ease of tracking and/or purification (e.g., a fluorescent protein, e.g., green fluorescent protein (GFP), YFP, RFP, CFP, mCherry, tdTomato, and the like; a histidine tag, e.g., a 6×His tag; a hemagglutinin (HA) tag; a FLAG tag; a Myc tag; and the like). In some embodiments, the heterologous sequence can provide for increased or decreased stability (i.e., the heterologous sequence is a stability control peptide, e.g., a degron, which in some cases is controllable (e.g., a temperature sensitive or drug controllable degron sequence, see below). In some embodiments, the heterologous sequence can provide for increased or decreased transcription from the target nucleic acid (i.e., the heterologous sequence is a transcription modulation sequence, e.g., a transcription factor/activator or a fragment thereof, a protein or fragment thereof that recruits a transcription factor/activator, a transcription repressor or a fragment thereof, a protein or fragment thereof that recruits a transcription repressor, a small molecule/drug-responsive transcription regulator, etc.). In some embodiments, the heterologous sequence can provide a binding domain (i.e., the heterologous sequence is a protein binding sequence, e.g., to provide the ability of a subject Cas9 fusion protein to bind to another protein of interest, e.g., a DNA or histone modifying protein, a transcription factor or transcription repressor, a recruiting protein, an RNA modification enzyme, an RNA-binding protein, a translation initiation factor, an RNA splicing factor, etc.). A heterologous nucleic acid sequence may be linked to another nucleic acid sequence (e.g., by genetic engineering) to generate a chimeric nucleotide sequence encoding a chimeric polypeptide.

[0134] A subject Cas9 fusion polypeptide (Cas9 fusion protein) can have multiple (1 or more, 2 or more, 3 or more, 4 or more, 5 or more, 6 or more, etc.) fusion partners in any combination of the above. As an illustrative example, a Cas9 fusion protein can have a heterologous sequence that provides an activity (e.g., for transcription modulation, target modification, modification of a protein associated with a target nucleic acid, etc.) and can also have a subcellular localization sequence (e.g., 1 or more NLSs). In some cases, such a Cas9 fusion protein might also have a tag for ease of tracking and/or purification (e.g., green fluorescent protein (GFP), YFP, RFP, CFP, mCherry, tdTomato, and the like; a histidine tag, e.g., a 6×His tag; a hemagglutinin (HA) tag; a FLAG tag; a Myc tag; and the like). As another illustrative example, a Cas9 protein can have one or more NLSs (e.g., two or more, three or more, four or more, five or more, 1, 2, 3, 4, or 5 NLSs). In some cases a fusion partner (or multiple fusion partners) (e.g., an NLS, a tag, a fusion partner providing an activity, etc.) is located at or near the C-terminus of Cas9. In some cases a fusion partner (or multiple fusion partners) (e.g., an NLS, a tag, a fusion partner providing an activity, etc.) is located at the N-terminus of Cas9. In some cases a Cas9 has a fusion partner (or multiple fusion partners)(e.g., an NLS, a tag, a fusion partner providing an activity, etc.) at both the N-terminus and C-terminus.

[0135] Suitable fusion partners that provide for increased or decreased stability include, but are not limited to degron sequences. Degrons are readily understood by one of ordinary skill in the art to be amino acid sequences that control the stability of the protein of which they are part. For example, the stability of a protein comprising a degron sequence is controlled in part by the degron sequence. In some cases, a suitable degron is constitutive such that the degron exerts its influence on protein stability independent of experimental control (i.e., the degron is not drug inducible, temperature inducible, etc.) In some cases, the degron provides the variant Cas9 protein with controllable stability such that the variant Cas9 protein can be turned “on” (i.e., stable) or “off” (i.e., unstable, degraded) depending on the desired conditions. For example, if the degron is a temperature sensitive degron, the variant Cas9 protein may be functional (i.e., “on”, stable) below a threshold temperature (e.g., 42° C., 41° C., 40° C., 39° C., 38° C., 37° C., 36° C., 35° C., 34° C., 33° C., 32° C., 31° C., 30° C., etc.) but non-functional (i.e., “off”, degraded) above the threshold temperature. As another example, if the degron is a drug inducible degron, the presence or absence of drug can switch the protein from an “off” (i.e., unstable) state to an “on” (i.e., stable) state or vice versa. An exemplary drug inducible degron is derived from the FKBP12 protein. The stability of the degron is controlled by the presence or absence of a small molecule that binds to the degron.

[0136] Suitable fusion partners include, but are not limited to, a polypeptide that provides for methyltransferase activity, demethylase activity, acetyltransferase activity, deacetylase activity, kinase activity, phosphatase activity, ubiquitin ligase activity, deubiquitinating activity, adenylation activity, deadenylation activity, SUMOylating activity, deSUMOylating activity, ribosylation activity, deribosylation activity, myristoylation activity, or demyristoylation activity, any of which can be directed at modifying nucleic acid directly (e.g., methylation of DNA or RNA) or at modifying a nucleic acid-associated polypeptide (e.g., a histone, a DNA binding protein, and RNA binding protein, and the like). Further suitable fusion partners include, but are not limited to boundary elements (e.g., CTCF), proteins and fragments thereof that provide periphery recruitment (e.g., Lamin A, Lamin B, etc.), and protein docking elements (e.g., FKBP/FRB, Pil1/Aby1, etc.).

[0137] Suitable fusion partners include, but are not limited to, a polypeptide that provides an activity that indirectly increases transcription by acting directly on the target nucleic acid or on a polypeptide (e.g., a histone, a DNA-binding protein, an RNA-binding protein, an RNA editing protein, etc.) associated with the target nucleic acid. Suitable fusion partners include, but are not limited to, a polypeptide that provides for methyltransferase activity, demethylase activity, acetyltransferase activity, deacetylase activity, kinase activity, phosphatase activity, ubiquitin ligase activity, deubiquitinating activity, adenylation activity, deadenylation activity, SUMOylating activity, deSUMOylating activity, ribosylation activity, deribosylation activity, myristoylation activity, or demyristoylation activity.

[0138] Additional suitable fusion partners include, but are not limited to, a polypeptide that directly provides for increased transcription and/or translation of a target nucleic acid (e.g., a transcription activator or a fragment thereof, a protein or fragment thereof that recruits a transcription activator, a small molecule/drug-responsive transcription and/or translation regulator, a translation-regulating protein, etc.).

[0139] Examples of fusion partners to accomplish increased or decreased transcription include, but are not limited to: (e.g., GAL4, VP16, VP64, the Krüppel associated box (KRAB or SKD); the Mad mSIN3 interaction domain (SID); the ERF repressor domain (ERD), etc.). In some such cases, a Cas9 fusion protein is targeted by the Cas9 guide RNA to a specific location (i.e., sequence) in the target nucleic acid and exerts locus-specific regulation such as blocking RNA polymerase binding to a promoter (which selectively inhibits transcription activator function), increasing transcription, and/or modifying the local chromatin status (e.g., when a fusion sequence is used that modifies the target nucleic acid or modifies a polypeptide associated with the target nucleic acid). In some cases, the changes are transient (e.g., transcription repression or activation). In some cases, the changes are inheritable (e.g., when epigenetic modifications are made to the target nucleic acid or to proteins associated with the target nucleic acid, e.g., nucleosomal histones).

[0140] Non-limiting examples of fusion partners for use when targeting ssRNA target nucleic acids include, but are not limited to splicing factors (e.g., RS domains); protein translation components (e.g., translation initiation, elongation, and/or release factors; e.g., eIF4G); RNA methylases; RNA editing enzymes (e.g., RNA deaminases, e.g., adenosine deaminase acting on RNA (ADAR), including A to I and/or C to U editing enzymes); helicases; RNA-binding proteins; and the like. It is understood that a fusion partner can include the entire protein or in some cases can include a fragment of the protein (e.g., a functional domain).

[0141] In some embodiments, the heterologous sequence can be fused to the C-terminus of the Cas9 protein. In some embodiments, the heterologous sequence can be fused to the N-terminus of the Cas9 protein. In some embodiments, the heterologous sequence can be fused to an internal portion (i.e., a portion other than the N- or C-terminus) of the Cas9 protein. In some cases, a heterologous sequence can be fused to both the N- and C-terminus.

[0142] In some embodiments, a subject variant Cas9 protein can be linked to a heterologous polypeptide (a heterologous amino acid sequence) via a linker polypeptide (e.g., one or more linker polypeptides). The linker polypeptide may have any of a variety of amino acid sequences. Proteins can be joined by a spacer peptide, generally of a flexible nature, although other chemical linkages are not excluded. Suitable linkers include polypeptides of between about 6 amino acids and about 40 amino acids in length, or between about 6 amino acids and about 25 amino acids in length. These linkers are generally produced by using synthetic, linker-encoding oligonucleotides to couple the proteins. Peptide linkers with a degree of flexibility will generally be preferred. The linking peptides may have virtually any amino acid sequence, bearing in mind that the preferred linkers will have a sequence that results in a generally flexible peptide. The use of small amino acids, such as glycine and alanine, are of use in creating a flexible peptide. The creation of such sequences is routine to those of skill in the art. A variety of different linkers are commercially available and are considered suitable for use.

[0143] Exemplary linker polypeptides include glycine polymers (G)ₙ, glycine-serine polymers (including, for example, (GS)ₙ, GSGGSₙ (SEQ ID NO: 1098), GGSGGSₙ (SEQ ID NO: 1099), and GGGSₙ (SEQ ID NO: 1100), where n is an integer of at least one), glycine-alanine polymers, alanine-serine polymers. Exemplary linkers can comprise amino acid sequences including, but not limited to, GGSG (SEQ ID NO: 1101), GGSGG (SEQ ID NO: 1102), GSGSG (SEQ ID NO: 1103), GSGGG (SEQ ID NO: 1104), GGGSG (SEQ ID NO: 1105), GSSSG (SEQ ID NO: 1106), and the like. The ordinarily skilled artisan will recognize that design of a peptide conjugated to any elements described above can include linkers that are all or partially flexible, such that the linker can include a flexible linker as well as one or more portions that confer less flexible structure.

[0144] Cas9 Guide RNA

[0145] A nucleic acid molecule that binds to a CRISPR/Cas protein (e.g., a Cas9 protein) and targets the complex to a specific location within a target nucleic acid is referred to herein as a “CRISPR/Cas guide nucleic acid” or “CRISPR/Cas guide RNA”. When the guide RNA is for a Cas9 protein, it is referred to as a “Cas9 guide RNA.”

[0146] A Cas9 guide RNA can be said to include two segments, a first segment (referred to herein as a “targeting segment”); and a second segment (referred to herein as a “protein-binding segment”). By “segment” it is meant a segment/section/region of a molecule, e.g., a contiguous stretch of nucleotides in a nucleic acid molecule. A segment can also mean a region/section of a complex such that a segment may comprise regions of more than one molecule.

[0147] The first segment (targeting segment) of a Cas9 guide RNA includes a nucleotide sequence (a guide sequence) that is complementary to (and therefore hybridizes with) a specific sequence (a target site) within a target nucleic acid (e.g., a target ssRNA, a target ssDNA, the complementary strand of a double stranded target DNA, etc.). The protein-binding segment (or “protein-binding sequence”) interacts with a Cas9 polypeptide. The protein-binding segment of a subject Cas9 guide RNA includes two complementary stretches of nucleotides that hybridize to one another to form a double stranded RNA duplex (dsRNA duplex). Site-specific binding and/or cleavage of the target nucleic acid can occur at locations determined by base-pairing complementarity between the Cas9 guide RNA (the guide sequence of the Cas9 guide RNA) and the target nucleic acid.

[0148] A Cas9 guide RNA and a Cas9 protein form a complex (e.g., bind via non-covalent interactions). The Cas9 guide RNA provides target specificity to the complex by including a targeting segment, which includes a guide sequence (a nucleotide sequence that is complementary to a sequence of a target nucleic acid). The Cas9 protein of the complex provides the site-specific activity (e.g., cleavage activity or an activity provided by the Cas9 protein when the Cas9 protein is a chimeric protein, i.e., has a fusion partner). In other words, the Cas9 protein is guided to a target nucleic acid sequence (e.g. a target sequence in a chromosomal nucleic acid, e.g., a chromosome; a target sequence in an extrachromosomal nucleic acid, e.g. an episomal nucleic acid, a minicircle, an ssRNA, an ssDNA, etc.; a target sequence in a mitochondrial nucleic acid; a target sequence in a chloroplast nucleic acid; a target sequence in a plasmid; a target sequence in a viral nucleic acid; etc.) by virtue of its association with the Cas9 guide RNA.

[0149] The “guide sequence” also referred to as the “targeting sequence” of a Cas9 guide RNA can be modified so that the Cas9 guide RNA can target a Cas9 protein to any desired sequence of any desired target nucleic acid, with the exception (e.g., as described herein) that the PAM sequence can be taken into account. Thus, for example, a Cas9 guide RNA can have a targeting segment with a sequence that has complementarity with (e.g., can hybridize to) a sequence in a nucleic acid in a eukaryotic cell, e.g., a viral nucleic acid, a eukaryotic nucleic acid (e.g., a eukaryotic chromosome, chromosomal sequence, a eukaryotic RNA, etc.), and the like.

[0150] In some embodiments, a subject Cas9 guide RNA includes two separate nucleic acid molecules: an “activator” and a “targeter” and is referred to herein as a “dual Cas9 guide RNA”, a “double-molecule Cas9 guide RNA”, or a “two-molecule Cas9 guide RNA” a “dual guide RNA”, or a “dgRNA.” In some embodiments, the activator and targeter are covalently linked to one another (e.g., via intervening nucleotides) and the guide RNA is referred to as a “single guide RNA”, a “Cas9 single guide RNA”, a “single-molecule Cas9 guide RNA,” or a “one-molecule Cas9 guide RNA”, or simply “sgRNA.”

[0151] An example dual Cas9 guide RNA comprises a crRNA-like (“CRISPR RNA”/“targeter”/“crRNA”/“crRNA repeat”) molecule and a corresponding tracrRNA-like (“trans-acting CRISPR RNA”/“activator”/“tracrRNA”) molecule. A crRNA-like molecule (targeter) comprises both the targeting segment (single stranded) of the guide nucleic acid and a stretch (“duplex-forming segment”) of nucleotides that forms one half of the dsRNA duplex of the protein-binding segment of the Cas9 guide RNA. A corresponding tracrRNA-like molecule (activator/tracrRNA) comprises a stretch of nucleotides (duplex-forming segment) that forms the other half of the dsRNA duplex of the protein-binding segment of the guide nucleic acid. In other words, a stretch of nucleotides of a crRNA-like molecule are complementary to and hybridize with a stretch of nucleotides of a tracrRNA-like molecule to form the dsRNA duplex of the protein-binding domain of the Cas9 guide RNA. As such, each targeter molecule can be said to have a corresponding activator molecule (which has a region that hybridizes with the targeter). The targeter molecule additionally provides the targeting segment. Thus, a targeter and an activator molecule (as a corresponding pair) hybridize to form a Cas9 guide RNA. The exact sequence of a given crRNA or tracrRNA molecule is characteristic of the species in which the RNA molecules are found. A subject dual Cas9 guide RNA can include any corresponding activator and targeter pair.

[0152] The term “activator” or “activator RNA” is used herein to mean a tracrRNA-like molecule (tracrRNA: “trans-acting CRISPR RNA”) of a Cas9 dual guide RNA (and therefore of a Cas9 single guide RNA when the “activator” and the “targeter” are linked together by, e.g., intervening nucleotides). Thus, for example, a Cas9 guide RNA (dgRNA or sgRNA) comprises an activator sequence (e.g., a tracrRNA sequence). A tracr molecule (a tracrRNA) is a naturally existing molecule that hybridizes with a CRISPR RNA molecule (a crRNA) to form a Cas9 dual guide RNA. The term “activator” is used herein to encompass naturally existing tracrRNAs, but also to encompass tracrRNAs with modifications (e.g., truncations, sequence variations, base modifications, backbone modifications, linkage modifications, etc.) where the activator retains at least one function of a tracrRNA (e.g., contributes to the dsRNA duplex to which Cas9 binds). In some cases the activator provides one or more stem loops that can interact with Cas9. An activator can be referred to as having a tracr sequence (tracrRNA sequence) and in some cases is a tracrRNA, but the term “activator” is not limited to naturally existing tracrRNAs.

[0153] The term “targeter” or “targeter RNA” is used herein to refer to a crRNA-like molecule (crRNA: “CRISPR RNA”) of a Cas9 dual guide RNA (and therefore of a Cas9 single guide RNA when the “activator” and the “targeter” are linked together, e.g., by intervening nucleotides). Thus, for example, a Cas9 guide RNA (dgRNA or sgRNA) comprises a targeting segment (which includes nucleotides that hybridize with (are complementary to) a target nucleic acid, and a duplex-forming segment (e.g., a duplex forming segment of a crRNA, which can also be referred to as a crRNA repeat). Because the sequence of a targeting segment (the segment that hybridizes with a target sequence of a target nucleic acid) of a targeter is modified by a user to hybridize with a desired target nucleic acid, the sequence of a targeter will often be a non-naturally occurring sequence. However, the duplex-forming segment of a targeter (described in more detail below), which hybridizes with the duplex-forming segment of an activator, can include a naturally existing sequence (e.g., can include the sequence of a duplex-forming segment of a naturally existing crRNA, which can also be referred to as a crRNA repeat). Thus, the term targeter is used herein to distinguish from naturally occurring crRNAs, despite the fact that part of a targeter (e.g., the duplex-forming segment) often includes a naturally occurring sequence from a crRNA. However, the term “targeter” encompasses naturally occurring crRNAs.

[0154] A Cas9 guide RNA (e.g. a dual guide RNA or a single guide RNA) can be comprised of any corresponding activator and targeter pair. In some cases, the duplex forming segments can be swapped between the activator and the targeter. In other words, in some cases, the targeter includes a sequence of nucleotides from a duplex forming segment of a tracrRNA (which sequence would normally be part of an activator) while the activator includes a sequence of nucleotides from a duplex forming segment of a crRNA (which sequence would normally be part of a targeter).

[0155] As noted above, a targeter comprises both the targeting segment (single stranded) of the Cas9 guide RNA and a stretch (“duplex-forming segment”) of nucleotides that forms one half of the dsRNA duplex of the protein-binding segment of the Cas9 guide RNA. A corresponding tracrRNA-like molecule (activator) comprises a stretch of nucleotides (a duplex-forming segment) that forms the other half of the dsRNA duplex of the protein-binding segment of the Cas9 guide RNA. In other words, a stretch of nucleotides of the targeter is complementary to and hybridizes with a stretch of nucleotides of the activator to form the dsRNA duplex of the protein-binding segment of a Cas9 guide RNA. As such, each targeter can be said to have a corresponding activator (which has a region that hybridizes with the targeter). The targeter molecule additionally provides the targeting segment. Thus, a targeter and an activator (as a corresponding pair) hybridize to form a Cas9 guide RNA. The particular sequence of a given naturally existing crRNA or tracrRNA molecule is characteristic of the species in which the RNA molecules are found. Examples of suitable activator and targeter are well known in the art.

[0156] A Cas9 guide RNA (e.g. a dual guide RNA or a single guide RNA) can include any corresponding activator and targeter pair. Non-limiting examples of nucleotide sequences that can be included in a Cas9 guide RNA (dgRNA or sgRNA) include sequences set forth in SEQ ID NOs: 831-1079, or complements thereof. For example, in some cases, sequences from SEQ ID NOs: 831-961 (which are from tracrRNAs) or complements thereof, can pair with sequences from SEQ ID NOs: 966-1079 (which are from crRNAs), or complements thereof, to form a dsRNA duplex of a protein binding segment.

[0157] Targeting Segment of a Cas9 Guide RNA

[0158] The first segment of a subject guide nucleic acid includes a guide sequence (a nucleotide sequence that is complementary to a sequence (a target site) in a target nucleic acid). In other words, the targeting segment of a subject guide nucleic acid can interact with a target nucleic acid (e.g., a single stranded RNA (ssRNA) and/or a single stranded DNA (ssDNA)) in a sequence-specific manner via hybridization (i.e., base pairing). As such, the nucleotide sequence of the targeting segment may vary (depending on the target) and can determine the location within the target nucleic acid that the Cas9 guide RNA and the target nucleic acid will interact. The targeting segment of a Cas9 guide RNA can be modified (e.g., by genetic engineering)/designed to hybridize to any desired sequence (target site) within a target nucleic acid (e.g., a eukaryotic target nucleic acid).

[0159] The targeting segment can have a length of 7 or more nucleotides (nt) (e.g., 8 or more, 9 or more, 10 or more, 12 or more, 15 or more, 20 or more, 25 or more, 30 or more, or 40 or more nucleotides). In some cases, the targeting segment can have a length of from 7 to 100 nucleotides (nt) (e.g., from 7 to 80 nt, from 7 to 60 nt, from 7 to 40 nt, from 7 to 30 nt, from 7 to 25 nt, from 7 to 22 nt, from 7 to 20 nt, from 7 to 18 nt, from 8 to 80 nt, from 8 to 60 nt, from 8 to 40 nt, from 8 to 30 nt, from 8 to 25 nt, from 8 to 22 nt, from 8 to 20 nt, from 8 to 18 nt, from 10 to 100 nt, from 10 to 80 nt, from 10 to 60 nt, from 10 to 40 nt, from 10 to 30 nt, from 10 to 25 nt, from 10 to 22 nt, from 10 to 20 nt, from 10 to 18 nt, from 12 to 100 nt, from 12 to 80 nt, from 12 to 60 nt, from 12 to 40 nt, from 12 to 30 nt, from 12 to 25 nt, from 12 to 22 nt, from 12 to 20 nt, from 12 to 18 nt, from 14 to 100 nt, from 14 to 80 nt, from 14 to 60 nt, from 14 to 40 nt, from 14 to 30 nt, from 14 to 25 nt, from 14 to 22 nt, from 14 to 20 nt, from 14 to 18 nt, from 16 to 100 nt, from 16 to 80 nt, from 16 to 60 nt, from 16 to 40 nt, from 16 to 30 nt, from 16 to 25 nt, from 16 to 22 nt, from 16 to 20 nt, from 16 to 18 nt, from 18 to 100 nt, from 18 to 80 nt, from 18 to 60 nt, from 18 to 40 nt, from 18 to 30 nt, from 18 to 25 nt, from 18 to 22 nt, or from 18 to 20 nt).

[0160] The nucleotide sequence (the targeting sequence) of the targeting segment that is complementary to a nucleotide sequence (target site) of the target nucleic acid can have a length of 10 nt or more. For example, the targeting sequence of the targeting segment that is complementary to a target site of the target nucleic acid can have a length of 12 nt or more, 15 nt or more, 18 nt or more, 19 nt or more, or 20 nt or more. In some cases, the nucleotide sequence (the targeting sequence) of the targeting segment that is complementary to a nucleotide sequence (target site) of the target nucleic acid has a length of 12 nt or more. In some cases, the nucleotide sequence (the targeting sequence) of the targeting segment that is complementary to a nucleotide sequence (target site) of the target nucleic acid has a length of 18 nt or more.

[0161] For example, the targeting sequence of the targeting segment that is complementary to a target sequence of the target nucleic acid can have a length of from 10 to 100 nucleotides (nt) (e.g., from 10 to 90 nt, from 10 to 75 nt, from 10 to 60 nt, from 10 to 50 nt, from 10 to 35 nt, from 10 to 30 nt, from 10 to 25 nt, from 10 to 22 nt, from 10 to 20 nt, from 12 to 100 nt, from 12 to 90 nt, from 12 to 75 nt, from 12 to 60 nt, from 12 to 50 nt, from 12 to 35 nt, from 12 to 30 nt, from 12 to 25 nt, from 12 to 22 nt, from 12 to 20 nt, from 15 to 100 nt, from 15 to 90 nt, from 15 to 75 nt, from 15 to 60 nt, from 15 to 50 nt, from 15 to 35 nt, from 15 to 30 nt, from 15 to 25 nt, from 15 to 22 nt, from 15 to 20 nt, from 17 to 100 nt, from 17 to 90 nt, from 17 to 75 nt, from 17 to 60 nt, from 17 to 50 nt, from 17 to 35 nt, from 17 to 30 nt, from 17 to 25 nt, from 17 to 22 nt, from 17 to 20 nt, from 18 to 100 nt, from 18 to 90 nt, from 18 to 75 nt, from 18 to 60 nt, from 18 to 50 nt, from 18 to 35 nt, from 18 to 30 nt, from 18 to 25 nt, from 18 to 22 nt, or from 18 to 20 nt). In some cases, the targeting sequence of the targeting segment that is complementary to a target sequence of the target nucleic acid has a length of from 15 nt to 30 nt. In some cases, the targeting sequence of the targeting segment that is complementary to a target sequence of the target nucleic acid has a length of from 15 nt to 25 nt. In some cases, the targeting sequence of the targeting segment that is complementary to a target sequence of the target nucleic acid has a length of from 18 nt to 30 nt. In some cases, the targeting sequence of the targeting segment that is complementary to a target sequence of the target nucleic acid has a length of from 18 nt to 25 nt. In some cases, the targeting sequence of the targeting segment that is complementary to a target sequence of the target nucleic acid has a length of from 18 nt to 22 nt. In some cases, the targeting sequence of the targeting segment that is complementary to a target site of the target nucleic acid is 20 nucleotides in length. In some cases, the targeting sequence of the targeting segment that is complementary to a target site of the target nucleic acid is 19 nucleotides in length.

[0162] The percent complementarity between the targeting sequence of the targeting segment and the target site of the target nucleic acid can be 60% or more (e.g., 65% or more, 70% or more, 75% or more, 80% or more, 85% or more, 90% or more, 95% or more, 97% or more, 98% or more, 99% or more, or 100%). In some cases, the percent complementarity between the targeting sequence of the targeting segment and the target site of the target nucleic acid is 100% over the seven contiguous 5′-most nucleotides of the target site of the target nucleic acid. In some cases, the percent complementarity between the targeting sequence of the targeting segment and the target site of the target nucleic acid is 60% or more over about 20 contiguous nucleotides. In some cases, the percent complementarity between the targeting sequence of the targeting segment and the target site of the target nucleic acid is 100% over the fourteen contiguous 5′-most nucleotides of the target site of the target nucleic acid and as low as 0% or more over the remainder. In such a case, the targeting sequence can be considered to be 14 nucleotides in length. In some cases, the percent complementarity between the targeting sequence of the targeting segment and the target site of the target nucleic acid is 100% over the seven contiguous 5′-most nucleotides of the target site of the target nucleic acid and as low as 0% or more over the remainder. In such a case, the targeting sequence can be considered to be 20 nucleotides in length.

[0163] In some cases, the percent complementarity between the targeting sequence of the targeting segment and the target site of the target nucleic acid is 100% over the 7 contiguous 5′-most nucleotides of the target site of the target nucleic acid (which can be complementary to the 3′-most nucleotides of the targeting sequence of the Cas9 guide RNA). In some cases, the percent complementarity between the targeting sequence of the targeting segment and the target site of the target nucleic acid is 100% over the 8 contiguous 5′-most nucleotides of the target site of the target nucleic acid (which can be complementary to the 3′-most nucleotides of the targeting sequence of the Cas9 guide RNA). In some cases, the percent complementarity between the targeting sequence of the targeting segment and the target site of the target nucleic acid is 100% over the 9 contiguous 5′-most nucleotides of the target site of the target nucleic acid (which can be complementary to the 3′-most nucleotides of the targeting sequence of the Cas9 guide RNA). In some cases, the percent complementarity between the targeting sequence of the targeting segment and the target site of the target nucleic acid is 100% over the 10 contiguous 5′-most nucleotides of the target site of the target nucleic acid (which can be complementary to the 3′-most nucleotides of the targeting sequence of the Cas9 guide RNA). In some cases, the percent complementarity between the targeting sequence of the targeting segment and the target site of the target nucleic acid is 60% or more (e.g., e.g., 65% or more, 70% or more, 75% or more, 80% or more, 85% or more, 90% or more, 95% or more, 97% or more, 98% or more, 99% or more, or 100%) over about 20 contiguous nucleotides.

[0164] In some cases, the percent complementarity between the targeting sequence of the targeting segment and the target site of the target nucleic acid is 100% over the 7 contiguous 5′-most nucleotides of the target site of the target nucleic acid and as low as 0% or more over the remainder. In such a case, the targeting sequence can be considered to be 7 nucleotides in length. In some cases, the percent complementarity between the targeting sequence of the targeting segment and the target site of the target nucleic acid is 100% over the 8 contiguous 5′-most nucleotides of the target site of the target nucleic acid and as low as 0% or more over the remainder. In such a case, the targeting sequence can be considered to be 8 nucleotides in length. In some cases, the percent complementarity between the targeting sequence of the targeting segment and the target site of the target nucleic acid is 100% over the 9 contiguous 5′-most nucleotides of the target site of the target nucleic acid and as low as 0% or more over the remainder. In such a case, the targeting sequence can be considered to be 9 nucleotides in length. In some cases, the percent complementarity between the targeting sequence of the targeting segment and the target site of the target nucleic acid is 100% over the 10 contiguous 5′-most nucleotides of the target site of the target nucleic acid and as low as 0% or more over the remainder. In such a case, the targeting sequence can be considered to be 10 nucleotides in length. In some cases, the percent complementarity between the targeting sequence of the targeting segment and the target site of the target nucleic acid is 100% over the 11 contiguous 5′-most nucleotides of the target site of the target nucleic acid and as low as 0% or more over the remainder. In such a case, the targeting sequence can be considered to be 11 nucleotides in length. In some cases, the percent complementarity between the targeting sequence of the targeting segment and the target site of the target nucleic acid is 100% over the 12 contiguous 5′-most nucleotides of the target site of the target nucleic acid and as low as 0% or more over the remainder. In such a case, the targeting sequence can be considered to be 12 nucleotides in length. In some cases, the percent complementarity between the targeting sequence of the targeting segment and the target site of the target nucleic acid is 100% over the 13 contiguous 5′-most nucleotides of the target site of the target nucleic acid and as low as 0% or more over the remainder. In such a case, the targeting sequence can be considered to be 13 nucleotides in length. In some cases, the percent complementarity between the targeting sequence of the targeting segment and the target site of the target nucleic acid is 100% over the 14 contiguous 5′-most nucleotides of the target site of the target nucleic acid and as low as 0% or more over the remainder. In such a case, the targeting sequence can be considered to be 14 nucleotides in length.

[0165] Constant Region of a Guide RNA

[0166] The “constant region” of a guide RNA as used herein is a region (portion, segment) of the guide RNA that does not need to change when a different target is selected. For example, when a different target sequence is targeted, a different guide sequence is used as part of the guide RNA, but the rest of the Cas9 guide RNA (3′ of the guide sequence) need not change. For example, in the case of a Cas9 guide RNA, the constant region can encompass all or a portion of the guide RNA outside of the guide sequence. For example, if the Cas9 guide RNA is a dual guide RNA, then a suitable constant region can be the constant region of a targeter (e.g., targeter RNA) (i.e., the region of a targeter RNA that does not include the guide sequence, e.g., the portion of the targeter RNA that is 3′ of the guide sequence). See FIG. 11 for a schematic of a Cas9 guide RNA.

[0167] A subject library can be generated that includes DNA molecules that each encode a Cas9 targeter RNA (e.g., where the guide sequence is variable and portion 3′ of the guide sequence is constant). In order to use such a library (e.g., for targeting a Cas9 protein to a target nucleic acid), an activator RNA (e.g., tracrRNA) (or a DNA encoding an activator RNA) can be provided (e.g., as part of a kit, at the time of use, provided by the user, etc.). Because the activator RNA is a constant region of a guide RNA (by definition, e.g., the sequence of the activator RNA portion of a Cas9 guide RNA need not change as different sequences are targeted, i.e., the sequence of the activator RNA portion of a Cas9 guide RNA need not change when the guide sequence is changed), the same activator RNA could be used with each of the Cas9 targeter RNAs present in the generated library.

[0168] If the Cas9 guide RNA is a single guide RNA (sgRNA), then a suitable constant region can be the entire region of the guide RNA outside of the guide sequence, which can include (i) the constant region of the targeter RNA, (ii) the activator RNA, e.g., the entire activator RNA, and (iii) any intervening nucleotides that connect the targeter RNA to the activator RNA. Thus, a subject library can be generated that includes DNA molecules that each encode a Cas9 single guide RNA (sgRNA) (e.g., where the guide sequence of the DNA molecules in the library is variable).

[0169] Examples of the constant region of a targeter (e.g., targeter RNA) include, but are not limited to, those set forth in SEQ ID NOs: 1092-1097 (which are illustrative examples of constant regions of targeter RNAs derived from S. pyogenes sequences). Examples of the constant region of a Cas9 single guide RNA include, but are not limited to, those set forth in SEQ ID NOs: 1080-1091 (which are illustrative examples of constant regions of Cas9 single guide RNAs derived from S. pyogenes sequences).

[0170] Examples of various Cas9 guide RNAs (and therefore associated constant regions) can be found in the art, for example, see Jinek et al., Science. 2012 Aug. 17; 337(6096):816-21; Chylinski et al., RNA Biol. 2013 May; 10(5):726-37; Ma et al., Biomed Res Int. 2013; 2013:270805; Hou et al., Proc Natl Acad Sci USA. 2013 Sep. 24; 110(39):15644-9; Jinek et al., Elife. 2013; 2:e00471; Pattanayak et al., Nat Biotechnol. 2013 September; 31(9):839-43; Qi et al, Cell. 2013 Feb. 28; 152(5):1173-83; Wang et al., Cell. 2013 May 9; 153(4):910-8; Auer et. al., Genome Res. 2013 Oct. 31; Chen et. al., Nucleic Acids Res. 2013 Nov. 1; 41(20):e19; Cheng et. al., Cell Res. 2013 October; 23(10):1163-71; Cho et. al., Genetics. 2013 November; 195(3):1177-80; DiCarlo et al., Nucleic Acids Res. 2013 April; 41(7):4336-43; Dickinson et. al., Nat Methods. 2013 October; 10(10):1028-34; Ebina et. al., Sci Rep. 2013; 3:2510; Fujii et. al, Nucleic Acids Res. 2013 Nov. 1; 41(20):e187; Hu et. al., Cell Res. 2013 November; 23(11):1322-5; Jiang et. al., Nucleic Acids Res. 2013 Nov. 1; 41(20):e188; Larson et. al., Nat Protoc. 2013 November; 8(11):2180-96; Mali et. al., Nat Methods. 2013 October; 10(10):957-63; Nakayama et. al., Genesis. 2013 December; 51(12):835-43; Ran et. al., Nat Protoc. 2013 November; 8(11):2281-308; Ran et. al., Cell. 2013 Sep. 12; 154(6):1380-9; Upadhyay et. al., G3 (Bethesda). 2013 Dec. 9; 3(12):2233-8; Walsh et. al., Proc Natl Acad Sci USA. 2013 Sep. 24; 110(39):15514-5; Xie et. al., Mol Plant. 2013 Oct. 9; Yang et. al., Cell. 2013 Sep. 12; 154(6):1370-9; Briner et al., Mol Cell. 2014 Oct. 23; 56(2):333-9; and U.S. patents and patent applications: U.S. Pat. Nos. 8,906,616; 8,895,308; 8,889,418; 8,889,356; 8,871,445; 8,865,406; 8,795,965; 8,771,945; 8,697,359; 20140068797; 20140170753; 20140179006; 20140179770; 20140186843; 20140186919; 20140186958; 20140189896; 20140227787; 20140234972; 20140242664; 20140242699; 20140242700; 20140242702; 20140248702; 20140256046; 20140273037; 20140273226; 20140273230; 20140273231; 20140273232; 20140273233; 20140273234; 20140273235; 20140287938; 20140295556; 20140295557; 20140298547; 20140304853; 20140309487; 20140310828; 20140310830; 20140315985; 20140335063; 20140335620; 20140342456; 20140342457; 20140342458; 20140349400; 20140349405; 20140356867; 20140356956; 20140356958; 20140356959; 20140357523; 20140357530; 20140364333; and 20140377868; all of which are hereby incorporated by reference in their entirety.

[0171] Target DNA Molecule

[0172] A target nucleic acid can be any nucleic acid (e.g., DNA, RNA), can be double strand or single stranded, can be any type of nucleic acid (e.g., a chromosome, derived from a chromosome, chromosomal, plasmid, viral, extracellular, intracellular, mitochondrial, chloroplast, linear, circular, etc.) and can be from any organism (e.g., as long as the Cas9 guide RNA can hybridize to a target sequence in a target nucleic acid, that target nucleic acid can be targeted). If a target nucleic acid is not double stranded DNA (e.g, RNA or single stranded DNA) any convenient step can first be taken to generate a double stranded target DNA that can be used in the subject methods.

[0173] For example, a subject DNA molecule can be any DNA molecule or collection of DNA molecules (e.g., a chromosome, a collection of chromosomes, etc.) from any source as long as the DNA molecule has two or more PAM sequences that are recognized by the one or PAM-recognition DNA endonucleases that are used in the subject methods. Because PAM sequences are relatively short, all or nearly all naturally existing sources of DNA (including DNA from any organism) will include two more PAM sequences. Examples of the types of suitable target DNA include but are not limited to: chromosomal DNA (e.g., a chromosome, a genome, a collection of chromosomes), viral DNA, unknown DNA collected from any source (e.g., collected from an environmental source), DNA from an organelle, mitochondrial DNA, chloroplast DNA, and the like). Examples of suitable cellular sources for the target DNA include, but are not limited to: a eukaryotic cell; a prokaryotic cell, (e.g., a bacterial cell or an archaeal cell), a cell of a single-cell eukaryotic organism; a plant cell (e.g., rice, soy, maize, corn, wheat, tomato, tobacco, fruit tree, etc.); an algal cell (e.g., Botryococcus braunii, Chlamydomonas reinhardtii, Nannochloropsis gaditana, Chlorella pyrenoidosa, Sargassum patens C. Agardh, and the like); a fungal cell (e.g., a yeast cell); an animal cell; a cell from an invertebrate animal (e.g. fruit fly, cnidarian, echinoderm, nematode, planarian, etc.); a cell from a vertebrate animal (e.g., fish, e.g., zebrafish, amphibian, e.g, frog, reptile, bird, e.g., chicken, mammal, and the like); a cell from a mammal (e.g., zoo animal, pet, canine, equine, porcine, rodent, primate, human, etc.); and the like.

[0174] Target Nucleic Acids and Target Cells of Interest

[0175] A target nucleic acid for a Cas9 guide RNA/Cas9 method can be DNA or RNA. A target nucleic acid can be double stranded (e.g., dsDNA, dsRNA) or single stranded (e.g., ssRNA, ssDNA). In some cases, a target nucleic acid is single stranded. In some cases, a target nucleic acid is a single stranded RNA (ssRNA). In some cases, a target ssRNA (e.g., a target cell ssRNA, a viral ssRNA, etc.) is selected from: mRNA, rRNA, tRNA, non-coding RNA (ncRNA), long non-coding RNA (lncRNA), and microRNA (miRNA). In some cases, a target nucleic acid is a single stranded DNA (ssDNA) (e.g., a viral DNA). As noted above, in some cases, a target nucleic acid is single stranded.

[0176] A target nucleic acid can be located anywhere, for example, outside of a cell in vitro, inside of a cell in vitro, inside of a cell in vivo, inside of a cell ex vivo. Suitable target cells (which can comprise target nucleic acids) include, but are not limited to: a bacterial cell; an archaeal cell; a cell of a single-cell eukaryotic organism; a plant cell; an algal cell, e.g., Botryococcus braunii, Chlamydomonas reinhardtii, Nannochloropsis gaditana, Chlorella pyrenoidosa, Sargassum patens C. Agardh, and the like; a fungal cell (e.g., a yeast cell); an animal cell; a cell from an invertebrate animal (e.g. fruit fly, cnidarian, echinoderm, nematode, etc.); a cell from a vertebrate animal (e.g., fish, amphibian, reptile, bird, mammal); a cell from a mammal (e.g., a cell from a rodent, a cell from a human, etc.); and the like. Any type of cell may be of interest (e.g. a stem cell, e.g. an embryonic stem (ES) cell, an induced pluripotent stem (iPS) cell, a germ cell (e.g., an oocyte, a sperm, an oogonia, a spermatogonia, etc.), a somatic cell, e.g. a fibroblast, a hematopoietic cell, a neuron, a muscle cell, a bone cell, a hepatocyte, a pancreatic cell; an in vitro or in vivo embryonic cell of an embryo at any stage, e.g., a 1-cell, 2-cell, 4-cell, 8-cell, etc. stage zebrafish embryo; etc.). Cells may be from established cell lines or they may be primary cells, where “primary cells”, “primary cell lines”, and “primary cultures” are used interchangeably herein to refer to cells and cells cultures that have been derived from a subject and allowed to grow in vitro for a limited number of passages, i.e. splittings, of the culture. For example, primary cultures are cultures that may have been passaged 0 times, 1 μme, 2 times, 4 times, 5 times, 10 times, or 15 times, but not enough times go through the crisis stage. Typically, the primary cell lines are maintained for fewer than 10 passages in vitro. Target cells can be unicellular organisms and/or can be grown in culture. If the cells are primary cells, they may be harvest from an individual by any convenient method. For example, leukocytes may be conveniently harvested by apheresis, leukocytapheresis, density gradient separation, etc., while cells from tissues such as skin, muscle, bone marrow, spleen, liver, pancreas, lung, intestine, stomach, etc. can be conveniently harvested by biopsy.

[0177] In some of the above applications, the subject methods may be employed to generate guide RNAs that can be used to induce target nucleic acid cleavage, target nucleic acid modification, and/or to bind target nucleic acids (e.g., for visualization, for collecting and/or analyzing, etc.) in mitotic or post-mitotic cells in vivo and/or ex vivo and/or in vitro (e.g., to disrupt production of a protein encoded by a targeted mRNA). Because the guide RNA provides specificity by hybridizing to target nucleic acid, a mitotic and/or post-mitotic cell of interest in the disclosed methods may include a cell from any organism (e.g. a bacterial cell, an archaeal cell, a cell of a single-cell eukaryotic organism, a plant cell, an algal cell, e.g., Botryococcus braunii, Chlamydomonas reinhardtii, Nannochloropsis gaditana, Chlorella pyrenoidosa, Sargassum patens C. Agardh, and the like, a fungal cell (e.g., a yeast cell), an animal cell, a cell from an invertebrate animal (e.g. fruit fly, cnidarian, echinoderm, nematode, etc.), a cell from a vertebrate animal (e.g., fish, amphibian, reptile, bird, mammal), a cell from a mammal, a cell from a rodent, a cell from a human, etc.).

[0178] “Protospacer Adjacent Motif” (PAM)

[0179] A wild type CRISPR/Cas protein (e.g., Cas9 protein) normally has nuclease activity that cleaves a target nucleic acid (e.g., a double stranded DNA (dsDNA)) at a target site defined by the region of complementarity between the guide sequence of the guide RNA and the target nucleic acid. In some cases, site-specific targeting to the target nucleic acid occurs at locations determined by both (i) base-pairing complementarity between the guide nucleic acid and the target nucleic acid; and (ii) a short motif referred to as the “protospacer adjacent motif” (PAM) in the target nucleic acid. For example, when a Cas9 protein binds to (in some cases cleaves) a dsDNA target nucleic acid, the PAM sequence that is recognized (bound) by the Cas9 polypeptide is present on the non-complementary strand (the strand that does not hybridize with the targeting segment of the guide nucleic acid) of the target DNA. In some cases, a PAM sequence has a length in a range of from 1 nt to 15 nt (e.g., 1 nt to 14 nt, 1 nt to 13 nt, 1 nt to 12 nt, 1 nt to 11 nt, 1 nt to 10 nt, 1 nt to 9 nt, 1 nt to 9 nt, 1 nt to 8 nt, 1 nt to 7 nt, 1 nt to 6 nt, 1 nt to 5 nt, 1 nt to 4 nt, 1 nt to 3 nt, 2 nt to 15 nt, 2 nt to 14 nt, 2 nt to 13 nt, 2 nt to 12 nt, 2 nt to 11 nt, 2 nt to 10 nt, 2 nt to 9 nt, 2 nt to 8 nt, 2 nt to 7 nt, 2 nt to 6 nt, 2 nt to 5 nt, 2 nt to 4 nt, 2 nt to 3 nt, 2 nt, or 3 nt).

[0180] CRISRPR/Cas (e.g., Cas9) proteins from different species can have different PAM sequence requirements. For example, in some embodiments (e.g., when the Cas9 protein is derived from S. pyogenes or a closely related Cas9 is used; see for example, Chylinski et al., RNA Biol. 2013 May; 10(5):726-37; and Jinek et al., Science. 2012 Aug. 17; 337(6096):816-21; both of which are hereby incorporated by reference in their entirety), the PAM sequence is NRG because the S. pyogenes Cas9 PAM (PAM sequence) is NAG or NGG (or NRG where “R” is A or G). For example, a Cas9 PAM sequence for S. pyogenes Cas9 is: NGG, NAG, AGG, CGG, GGG, TGG, AAG, CAG, GAG, and TAG.

[0181] In some embodiments (e.g., when a Cas9 protein is derived from the Cas9 protein of Neisseria meningitidis or a closely related Cas9 is used), the PAM sequence (e.g., of a target nucleic acid) can be 5′-NNNNGANN-3′, 5′-NNNNGTTN-3′, 5′-NNNNGNNT-3′, 5′-NNNNGTNN-3′, 5′-NNNNGNTN-3′, or 5′-NNNNGATT-3′, where N is any nucleotide. In some embodiments (e.g., when a Cas9 protein is derived from Streptococcus thermophilus #1 or a closely related Cas9 is used), the PAM sequence (e.g., of a target nucleic acid) can be 5′-NNAGAA-3′, 5′-NNAGGA-3′, 5′-NNGGAA-3′, 5′-NNANAA-3′, or 5′-NNGGGA-3′ where N is any nucleotide. In some embodiments (e.g., when a Cas9 protein is derived from Treponema denticola (TD) or a closely related Cas9 is used), the PAM sequence (e.g., of a target nucleic acid) can be 5′-NAAAAN-3′, 5′-NAAAAC-3′, 5′-NAAANC-3′, 5′-NANAAC-3′, or 5′-NNAAAC-3′, where N is any nucleotide. As would be known by one of ordinary skill in the art, additional PAM sequences for other Cas9 polypeptides can readily be determined using bioinformatic analysis (e.g, analysis of genomic sequencing data). See Esvelt et al., Nat Methods. 2013 November; 10(11):1116-21, for additional information.

[0182] PAM-Recognition DNA Endonucleases

[0183] In some cases, such a DNA endonucleases is referred to herein as a PAM-recognition DNA endonuclease. A “PAM-recognition DNA endonuclease” as used herein refers to a DNA endonuclease that specifically binds to a recognition site (recognition sequence) that includes a PAM sequence (e.g., a Cas9 PAM). In some cases, a PAM-recognition DNA endonuclease specifically binds to and cleaves within a recognition site (recognition sequence) that includes a PAM sequence (e.g., a Cas9 PAM). In cases where a recognition site of a PAM-recognition DNA endonuclease includes a Cas9 PAM, the endonuclease can be referred to as a Cas9 PAM-recognition DNA endonuclease.

[0184] In many cases, the recognition sequence includes nucleotides in addition to the PAM sequence. For example, the recognition sequence of the PAM-recognition DNA endonuclease HpaII is CCGG (C/CGG where “/” is the cleavage site). Thus, while HpaII does not recognize/cleave all PAM sequences, it has a recognition site that includes a PAM sequence and is therefore referred to herein as a PAM-recognition DNA endonuclease. HpaII is an example of a DNA endonuclease that cleaves specifically binds to and cleaves within a recognition site (recognition sequence) that includes a PAM sequence. Because the recognition site of HpaII includes a Cas9 PAM, HpaII can also be referred to as a Cas9 PAM-recognition DNA endonuclease.

[0185] In some cases, a DNA molecule (e.g., a target DNA such as chromosomal DNA) is contacted with one or more (e.g., two or more, three or more, four or more, etc.) (e.g., a composition (e.g., a cocktail) that includes two or more, three or more, or four or more) PAM-recognition DNA endonucleases. In some cases, a PAM-recognition DNA endonuclease is selected from: BfaI, HpaII, ScrFI, MspI, BstNI, NciI, BsiSI, HapII, MaeI, XspI, AsuC2I, BcnI, BpuMI, CauII, BciT130I, BptI, BseBI, BsiLI, Bst2UI, BstOI, MvaI, Bme1390I, BmrFI, and MspR9I. In some cases, a DNA molecule (e.g., a target DNA such as chromosomal DNA) is contacted with two or more (e.g., three or more, four or more, etc.) (e.g., a composition (e.g., a cocktail) that includes two or more, three or more, or four or more) PAM-recognition DNA endonucleases selected from the group consisting of: BfaI, HpaII, ScrFI, MspI, BstNI, NciI, BsiSI, HapII, MaeI, XspI, AsuC2I, BcnI, BpuMI, CauII, BciT130I, BptI, BseBI, BsiLI, Bst2UI, BstOI, MvaI, Bme1390I, BmrFI, and MspR9I. In some cases, a DNA molecule (e.g., a target DNA such as chromosomal DNA) is contacted with a composition (e.g., a cocktail) that includes the PAM-recognition DNA endonucleases BfaI, HpaII, and ScrFI.

[0186] The recognition sites for the PAM-recognition DNA endonucleases listed above are:

[0187] BfaI: C/TAG

[0188] HpaII: C/CGG

[0189] ScrFI: CC/NGG

[0190] MspI: C/CGG

[0191] BstNI: CC/WGG

[0192] NciI: CC/SGG

[0193] BsiSI, HapII: C/CGG

[0194] MaeI, XspI: C/TAG

[0195] AsuC2I, BcnI, BpuMI, CauII: CC/SGG

[0196] BciT130I, BptI, BseBI, BsiLI, Bst2UI, BstOI, MvaI: CC/WGG

[0197] Bme1390I, BmrFI, MspR9I: CC/NGG

[0198] where “N” is any nucleotide (e.g., A,G,C,T); “W” is A or T; and “S” is G or C.

[0199] In some cases (e.g., as above), a PAM-recognition DNA endonuclease cleaves in the recognition sequence immediately 5′ to the PAM. However, DNA endonucleases that recognize a PAM (e.g., an NRG, NGG, NAG motif) but cut at a location other than immediately 5′ to the PAM can also be used in the subject methods and kits. Adapters (such as those used in the working examples below, see FIG. 9A and FIG. 9B) can be modified to compensate. For example, BssKI (with a recognition site of N/CCNGG) and PspGI (with a recognition site of N/CCWGG) can be used as PAM-recognition DNA endonucleases if a “CC” were included at the 5′ terminus of the first adapter, which would replace the “lost” CC (lost from the target DNA during cleavage). Without compensating to include the “CC”, the cleavage fragments would not contain guide sequences because the cleavage fragments would not include sequences that were adjacent to PAMs in the intact starting material (e.g., intact chromosomal DNA).

[0200] As discussed above, some non-S. pyogenes Cas9 orthologs use PAMs other than NRG. Most other species' PAMs are 4-5 nucleotides in length and are thus not as frequently found in a given target DNA (e.g., genome). There are also likely to be fewer restriction enzymes (PAM-recognition DNA endonucleases) that cut within them. It is also conceivable that Cas9 derivatives will be engineered that require different PAMs, or no PAM at all. Thus, one or more PAM-recognition DNA endonucleases that are selected for a method, composition, or kit described herein can depend on the type of guide RNA desired, and need not be limited to the recognition of a particular PAM sequence. Moreover, selecting PAMs using restriction enzymes may not always be necessary for implementing the general techniques described herein.

[0201] Distal Cleaving DNA Endonucleases

[0202] Once a library of cleavage fragments are generated (e.g., via contacting a target DNA with one or more PAM-recognition DNA endonucleases), a distal cleaving DNA endonuclease can be used to cleave the cleavage fragments further, reducing (trimming) them to a desired length (e.g., the desired length of a guide sequence). In order to achieve trimming to a desired length, a recognition site (a DNA that includes a recognition sequence) is added to the cleavage fragments (via attachment to a first DNA adapter), where the recognition site is recognized by a distal cleaving DNA endonuclease.

[0203] A subject “distal cleaving DNA endonuclease” is a DNA endonuclease that cleaves at a distance of from its recognition sequence, and many such DNA endonucleases are known in the art. Because the goal of using a distal cleaving DNA endonuclease in the subject methods is to generate guide sequences of a guide RNA (by trimming the cleavage fragments generated by the one or more PAM-recognition DNA endonucleases), the distance of cleavage (from its recognition sequence) can be coordinated with the positioning of the recognition sequence within the first DNA adapter (described elsewhere herein). For example, if one desires a guide sequence of 15 nucleotides, then a distal cleaving DNA endonuclease can be used that cleaves at a distance of 15 nucleotides from the recognition sequence if the recognition sequence is positioned at the end of first DNA adapter. If, for example, the recognition sequence was instead embedded 5 nucleotides into the DNA adapter, then the cleavage would occur 10 nucleotides into the cleavage fragment.

[0204] As an illustrative example, if a 17 nucleotide guide sequence is desired, a distal cleaving DNA endonuclease that cleaves at a distance of 17 nucleotides (from the recognition sequence) can be used when the first DNA adapter includes the recognition sequence at the end of the adapter. Alternatively, a distal cleaving DNA endonuclease that cleaves at a distance of 18 nucleotides (from the recognition sequence) can be used if the recognition sequence is embedded by 1 nucleotide into the first DNA adapter. As another example, a distal cleaving DNA endonuclease that cleaves at a distance of 22 nucleotides (from the recognition sequence) can be used if the recognition sequence is embedded 5 nucleotides into the first DNA adapter.

[0205] Thus, in some cases, a distal cleaving DNA endonuclease of the subject methods, compositions and/or kits, is one that cleaves at a distance in the range of from of 10 to 50 nucleotides (nt) (e.g., from 10 to 40 nt, from 10 to 30 nt, from 10 to 25 nt, from 10 to 23 nt, from 15 to 50 nt, from 15 to 40 nt, from 15 to 30 nt, from 15 to 25 nt, from 15 to 23 nt, from 17 to 50 nt, from 17 to 40 nt, from 17 to 30 nt, from 17 to 25 nt, from 17 to 23 nt, from 20 to 50 nt, from 20 to 40 nt, from 20 to 30 nt, from 20 to 25 nt, from 20 to 23 nt) from its recognition site (recognition sequence) (the sequence to which the distal cleaving DNA endonuclease specifically binds). In some cases, a distal cleaving DNA endonuclease of the subject methods, compositions and/or kits, is one that cleaves at a distance in the range of from 17 to 40 nt (e.g., from 17 to 30 nt, from 17 to 25 nt, from 17 to 23 nt) from its recognition site.

[0206] In some cases, a subject distal cleaving DNA endonuclease is a type II DNA endonuclease (type II restriction enzyme) (e.g., see Morgan et al, Nucleic Acids Res. 2009 August; 37(15):5208-21). In some cases, a subject distal cleaving DNA endonuclease is a type IIG DNA endonuclease (type IIG restriction enzyme). Suitable examples of distal cleaving DNA endonucleases include but are not limited to (where the recognition site for each is followed by the cleavage distance):

| | | |
|---|---|---|
| ApyPI | ATCGAC | (20/18) |
| AquII | GCCGNAC | (20/18) |
| AquIII | GAGGAG | (20/18) |
| AquIV | GRGGAAG | (20/18) |
| CdpI | GCGGAG | (20/18) |
| CstMI | AAGGAG | (20/18) |
| DraRI | CAAGNAC | (20/18) |
| DrdIV | TACGAC | (20/18) |
| MaqI | CRTTGAC | (20/18) |
| MmeI | TCCRAC | (20/18) |
| NhaXI | CAAGRAG | (20/18) |
| NlaCI | CATCAC | (19/17) |
| NmeAIII | GCCGAG | (21/19) |
| PlaDI | CATCAG | (21/19) |
| PspOMII | CGCCCAR | (20/18) |
| PspPRI | CCYCAG | (21/19) |
| Reel | CATCGAC | (20/18) |
| RpaB5I | CGRGGAC | (20/18) |
| SdeAI | CAGRAG | (21/19) |
| SpoDI | GCGGRAG | (20/18) |
| BsbI | CAACAC | (21/19) |

[0207] In some cases, a subject distal cleaving DNA endonuclease is selected from the group consisting of: ApyPI, AquII, AquIII, AquIV, CdpI, CstMI, DraRI, DrdIV, MaqI, MmeI, NhaXI, NlaCI, NmeAIII, PlaDI, PspOMII, PspPRI, RceI, RpaB5I, SdeAI, SpoDI, and BsbI. In some cases, a subject distal cleaving DNA endonuclease is MmeI.

[0208] In some cases, a PAM-recognition DNA endonuclease can be a distal cleaving DNA endonuclease (described elsewhere herein). For example a first DNA adapter may not be necessary for including a recognition sequence for a distal cleaving DNA endonuclease if the one or more PAM-recognition DNA endonucleases used are themselves distal cleaving DNA endonucleases. For example, the enzyme CchIII has the recognition site of NN/NNNNNNNNNNNNNNNNNNCTTGGG (where “/” indicates the point of cleavage). Thus, such an enzyme could be used to generate guide sequences directly from target DNA without the need for a DNA adapter and/or without needing to contact the cleavage fragments with a distal cleaving DNA endonuclease other than the one that is both a PAM-recognition DNA endonuclease and a distal cleaving DNA endonuclease. In some cases, such a DNA endonuclease is a type IIS DNA endonuclease.

[0209] Adapter Removal DNA Endonucleases

[0210] An “adapter removal DNA endonuclease” as used herein can be any DNA endonuclease that is used to remove all or a portion of the first DNA adapter once the guide sequence library had been generated (e.g., after cleavage with a distal cleaving DNA endonuclease). Once a DNA adapter is added to the cleavage fragments (e.g., after cleaving with a PAM-recognition DNA endonuclease), the goal is to eventually attach to the guide sequences a DNA encoding a constant region of a guide RNA (e.g., constant region of a Cas9 targeter RNA, of a Cas sgRNA, etc.). In some cases, in order to do so, all or a portion of the first DNA adapter must be removed (e.g., see FIG. 8A and FIG. 8B, and the associated example adapters of FIG. 9A and FIG. 9B for example scenarios). In some cases, to allow for this, the first DNA adapter includes a recognition sequence for an adapter removal DNA endonuclease. However, in some embodiments, because the first DNA adapter also includes a first recognition site for a distal cleaving DNA endonuclease, the second recognition site (the site for the adapter removal DNA endonuclease) is for a DNA endonuclease that cleaves outside of the second recognition sequence.

[0211] Thus, like a distal cleaving DNA endonuclease, an adapter removal DNA endonuclease is often one that cleaves outside of its own recognition sequence. Thus, in some cases, a suitable adapter removal DNA endonuclease is any DNA endonuclease that cleaves outside of its own recognition sequence. In some cases, the adapter removal DNA endonuclease is BsaXI.

[0212] In some cases, an adapter removal DNA endonuclease of the subject methods, compositions, and/or kits, is one that cleaves at a distance in the range of from of 1 to 40 nucleotides (nt) (e.g., from 1 to 30 nt, from 1 to 25 nt, from 1 to 20 nt, from 1 to 15 nt, from 1 to 12 nt, from 1 to 10 nt, from 1 to 8 nt, from 1 to 5 nt, from 2 to 40 nt, from 2 to 30 nt, from 2 to 25 nt, from 2 to 20 nt, from 2 to 15 nt, from 2 to 12 nt, from 2 to 10 nt, from 2 to 8 nt, from 2 to 5 nt, from 3 to 40 nt, from 3 to 30 nt, from 3 to 25 nt, from 3 to 20 nt, from 3 to 15 nt, from 3 to 12 nt, from 3 to 10 nt, from 3 to 8 nt, from 3 to 5 nt) from its recognition site (recognition sequence) (the sequence to which the adapter removal DNA endonuclease specifically binds). In some cases, an adapter removal DNA endonuclease of the subject methods, compositions, and/or kits, is one that cleaves at a distance in the range of from 1 to 15 nt (e.g., from 2 to 15 nt, from 3 to 15 nt, from 3 to 12 nt, from 3 to 10 nt, from 3 to 8 nt, from 1 to 12 nt, from 1 to 10 nt, from 1 to 8 nt, from 1 to 5 nt) from its recognition site.

[0213] In some cases, the recognition sequence (adapter removal DNA endonuclease) is positioned within the first DNA adapter such that the adapter removal DNA endonuclease (e.g., the second DNA endonuclease) will cleave within or immediately adjacent to the first recognition sequence (the recognition sequence for the first DNA endonuclease, the distal cleaving DNA endonuclease). Thus, in some cases, an adapter removal DNA endonuclease specifically binds to a recognition sequence present in a DNA adapter and cleaves at one or more sites to remove all or a portion of the DNA adapter from the target DNA fragments to which it is bound.

[0214] See the examples below as well as FIGS. 8A-8B and FIGS. 9A-9B for non-limiting examples.

[0215] DNA Adapters/Linkers

[0216] The terms “DNA adapter” and “DNA linker” are used interchangeably herein to mean a DNA molecule used during a subject method for the production of a subject composition (e.g., a library of DNA molecules encoding guide RNAs). The terms are meant to encompass relatively short DNA molecules. The terms are used herein to refer to DNA molecules (e.g., Adapter 1, Adapter 2, Adapter 3, a DNA linker, etc.) having a length of from 5 to 300 base pairs (bp) in length (e.g., from 5 to 250 bp, from 5 to 225 bp, from 5 to 200 bp, from 5 to 180 bp, from 5 to 150 bp, from 10 to 300 bp, from 10 to 300 bp, from 10 to 250 bp, from 10 to 225 bp, from 10 to 200 bp, from 10 to 180 bp, from 10 to 150 bp, from 15 to 300 bp, from 15 to 250 bp, from 15 to 225 bp, from 15 to 200 bp, from 15 to 180 bp, from 15 to 150 bp, from 20 to 300 bp, from 20 to 300 bp, from 20 to 250 bp, from 20 to 225 bp, from 20 to 200 bp, from 20 to 180 bp, from 20 to 150 bp, from 25 to 300 bp, from 25 to 250 bp, from 25 to 225 bp, from 25 to 200 bp, from 25 to 180 bp, from 25 to 150 bp, from 30 to 300 bp, from 30 to 250 bp, from 30 to 225 bp, from 30 to 200 bp, from 30 to 180 bp, or from 30 to 150 bp in length).

[0217] However, a nucleic acid can be said to include (comprise) a subject DNA adapter. Such nucleic acids can therefore be longer than the adapter itself. For example, a vector can be said to include (comprise) a subject DNA adapter and/or DNA linker. In some cases, subject methods or kits refer to two DNA oligonucleotides that hybridize to form a given DNA linker or DNA adapter.

[0218] As an example, a nucleic acid that includes (comprises) a first DNA adapter (described in further detail below) can be a vector (e.g., a linearized vector, circular vector, viral vector, plasmid vector, etc.) that includes sequences that will facilitate the subject methods. For example, the protocol illustrated in FIG. 8B can be accomplished by including the sequences of Adapter 1 in a vector (e.g., viral vector, plasmid vector, linearized plasmid vector) such that the end product is a library of DNA molecules that encode guide RNAs where the DNAs molecules are vectors (e.g., circular vectors, linear vectors, viral vectors, plasmid vectors, linearized plasmid vectors, etc.). For example, a vector can be used that includes Adapter 1, where the vector includes the sequences of adapter 1 on one end of the vector (and optionally the sequences of Adapter 2 on the other end of the vector). This would allow for the entire protocol to be carried out using only one DNA adapter (e.g., a single plasmid and/or viral vector could be provided).

[0219] In some cases, an adapter can include a recognition sequence that is recognized by a DNA endonuclease so that self-ligated adapters (e.g., present in tandem) can be removed. To decrease the chance that such an endonuclease would cleave within the target DNA to which the adapter is attached, the recognition site used can be one that is recognized by a rare cutting endonuclease (e.g., a DNA endonuclease that recognizes a recognition sequence that is 7 base pairs or greater, 8 base pairs or greater, 9 base pairs or greater, etc.).

[0220] In some cases, the recognition site used so that self-ligated adapters (e.g., present in tandem) can be removed, can be a recognition sequence that is recognized by a PAM-recognition DNA endonuclease (e.g., the one or more PAM-recognition DNA endonucleases used to cleave the target DNA). This would reduce the chance of cleaving the target DNA to which the adapter is attached to nearly zero because if the target DNA contains such a site, it should have been cleaved during the initial cleavage (e.g., during cleavage with the one or more PAM-recognition DNA endonucleases). Thus, in some cases, a subject adapter (e.g., Adapter 1, Adapter 2, Adapter 3, a DNA linker, etc.) can include a recognition sequence that is recognized by a PAM-recognition DNA endonuclease (e.g., the recognition sequence can include a PAM sequence, e.g., a Cas9 PAM sequence). In some cases, an adapter (e.g., Adapter 1, Adapter 2, Adapter 3, a DNA linker, etc.) can include a recognition sequence that is recognized by the same PAM-recognition DNA endonuclease(s) used in the first step. Thus, in some cases, the first adapter includes a recognition sequence (e.g., one that includes a PAM sequence) that is recognized and cleaved by a PAM-recognition DNA endonuclease (e.g., see FIG. 9A). In some cases, a subject method includes a of step contacting an adapter-attached DNA molecule (e.g., adapter attached cleavage fragments) with a PAM-recognition DNA endonuclease.

[0221] In some cases, a subject adapter (e.g., Adapter 1, Adapter 2, Adapter 3, a DNA linker, etc.) can include a recognition sequence that is recognized by a rare cutting endonuclease (e.g., a DNA endonuclease that recognizes a recognition sequence that is 7 base pairs or greater, 8 base pairs or greater, 9 base pairs or greater, etc.). In some cases, a subject method includes a step of contacting an adapter-attached DNA molecule (e.g., adapter attached cleavage fragments) with a rare cutting endonuclease (e.g., a DNA endonuclease that recognizes a recognition sequence that is 7 base pairs or greater, 8 base pairs or greater, 9 base pairs or greater, etc.).

[0222] First DNA Adapter (Adapter 1)

[0223] In some cases, a first DNA adapter includes (i) a first recognition sequence for a first DNA endonuclease (Distal cleaving DNA endonuclease) that cleaves at a cleavage site outside of the first recognition sequence, wherein the first recognition sequence is positioned within the first DNA adapter such that said first DNA endonuclease will specifically bind to the first recognition sequence and will cleave at a site within a target DNA sequence that is attached to the first DNA adapter; and (ii) a second recognition sequence for a second DNA endonuclease (an adapter removal DNA endonuclease) that cleaves at a cleavage site outside of the second recognition sequence, wherein the second recognition sequence is positioned within the first DNA adapter such that said second DNA endonuclease will cleave within or immediately adjacent to the first recognition sequence. In some cases, the first DNA adapter includes a nucleotide sequence encoding a constant region of a Cas9 sgRNA or a Cas9 targeter RNA. In some cases, a vector that includes the first DNA adapter such that the first DNA adapter is present as part of the vector.

[0224] In some cases, the first recognition sequence is a recognition sequence for any of the distal cleaving DNA endonucleases described elsewhere herein. For example, in some cases, the first recognition sequence is a recognition sequence for one or more DNA endonucleases selected from the group consisting of: MmeI, NmeAIII, and BsbI. In some cases, the first recognition sequence is a recognition sequence for MmeI.

[0225] The second recognition sequence is a recognition sequence for any of the adapter removal DNA endonucleases described elsewhere herein. For example, in some cases, the first recognition sequence is a recognition sequence for BsaXI.

[0226] Second DNA Adapter (Adapter 2)

[0227] In some cases, a first DNA adapter includes one or more of: (a) an RNA polymerase promoter (e.g., any desired promoter such as a T7 promoter), (b) a recognition sequence that facilitates cloning (e.g., any recognition site that allows the attached DNA to be ligated into a vector), and (c) an overhang (e.g, any overhand that allows the attached DNA to be ligated into a vector). The Examples section below as well as FIG. 8A, FIG. 8B, FIG. 9A, and FIG. 9B provide illustrative examples of a second DNA adapter and elements that can be included.

[0228] Blunting

[0229] In some cases, a subject method includes a step of blunting. Such a step will be known to one of ordinary skill in the art and any convenient method of blunting can be used. For example, a nuclease (e.g., mung bean nuclease) can be used to remove the single stranded portion of sticky ends generated by the subject DNA endonucleases.

[0230] Degeneracy

[0231] In some cases, one or more of the DNA endonucleases used herein will generate a sticky end, that will be present after cleavage. In order to attach an adapter to a population of DNA molecules (e.g., cleavage fragments) having sticky ends, where the bases that are part of the sticky ends are not predictable (e.g., when the endonuclease cuts at a site that is a predictable number of nucleotides from its recognition sequence, but the sequence at the actual cleavage site is not predictable), an adapter can include a corresponding overhang having a corresponding number of “n” nucleotides. For example, if each cleavage fragment of a population of cleavage fragments has an undefined (variable) 2 base pair 5′ overhang, an appropriate adapter (to be attached at the overhang site) can have a 2 nucleotide 5′ overhang where the overhang nucleotides are both “n.” In such a cases, the adapter is referred to as if it were a single molecule, but the adapter but is really a population of adapters where the nn nucleotides vary from individual adapter to individual adapter within the population. Thus, an adapter can have one or more “n” nucleotides (e.g., nn nucleotides) such that the population of adapters includes adapters of all possible base combinations at the “n” nucleotides. This is also referred to in the art as degeneracy. Thus, a subject adapter can have degeneracy at particular nucleotides (e.g., those indicated by an “n”).

[0232] In some cases a subject method includes a step of amplifying (e.g., via PCR) the library of DNA molecules encoding Cas9 sgRNAs or Cas9 targeter RNAs. In some cases, the library of DNA molecules that are produced by the subject methods (encoding Cas9 targeter RNAs or Cas9 sgRNAs) can be inserted into vectors (e.g., directly or via amplification by PCR, e.g., using primers that incorporate restriction sites to allow for cleavage and cloning into a vector such as a viral vector or plasmid).

[0233] Generating Guide RNAs

[0234] In some cases, the method includes a step of contacting the library of DNA molecules encoding Cas9 sgRNAs or Cas9 targeter RNAs (or an amplified library) with an RNA polymerase (e.g., T7 RNA polymerase) to generate a library of Cas9 sgRNAs or a library of Cas9 targeter RNAs. For example, if the DNA Linker is a vector, then the library of DNA molecules encoding Cas9 sgRNAs or Cas9 targeter RNAs can be a library of vectors (e.g., viral vectors, plasmid vectors, etc.). In some cases, the individual DNA molecules (e.g., vectors) from the library can be isolated (e.g., by transfecting/transforming cells with the library and selecting individual colonies/cells) from one another. For example, such a library can be separated into individual wells of multi-well plates (as bacterial colonies, viral vectors, plasmids, eukaryotic cell clones, etc.).

[0235] Non-Cas9 CRISPR/Cas Systems and Guide RNAs

[0236] As will be readily appreciated by one of ordinary skill in the art, the compositions (e.g., including kits) and methods provided in this disclosure are not limited to guide RNAs from Cas9 CRISPR/Cas systems (i.e., type II CRISPR/Cas systems). For example, the compositions and methods described herein can be used to generate a library of DNA molecules encoding CRISPR/Cas guide RNAs from any CRISPR/Cas system (e.g., type I and/or type III systems). The compositions and methods described herein can be used to generate a library of DNA molecules encoding any desired guide RNA with any desired length of guide sequence, where the guide sequence is located in the target DNA adjacent to a PAM sequence (e.g., by (i) choosing appropriate PAM-recognition DNA endonuclease(s); (ii) choosing a distal-cleaving DNA endonuclease that cleaves at the desired distance from its recognition sequence relative to the position of the recognition sequence in the first DNA adapter; and (iii) using a DNA encoding a constant region of the desired guide RNA).

[0237] For example, in some cases, a subject composition (e.g., kit) and/or method is for generating a library of DNA molecules encoding CRISPR/Cas guide RNAs (e.g., a library of DNA molecules encoding guide RNAs of a type I system, a library of DNA molecules encoding guide RNAs of a type II system, a library of DNA molecules encoding guide RNAs of a type III system, and the like).

[0238] Kits

[0239] The present disclosure provides kits that include various combinations of components useful in performing the subject methods. Components of a subject kit can be in present in the same or separate containers. For example, in some cases, the components can be combined in a single container. Any of the kits described herein can include one or more additional reagents, where such additional reagents can be selected from: a dilution buffer; a reconstitution solution; a wash buffer; a control reagent; a control expression vector or RNA or DNA polynucleotide; a reagent for in vitro production of a subject variant Cas9 protein from DNA or RNA, and the like.

[0240] In some cases, a subject kit for generating a library of DNA molecules encoding guide RNAs (e.g., Cas9 single guide RNAs (sgRNAs), Cas9 targeter RNAs, etc.) includes (a) a first DNA adapter, two DNA oligonucleotides that hybridize to form said first DNA adapter, or a nucleic acid comprising said first DNA adapter, wherein the first DNA adapter includes: (i) a first recognition sequence for a first DNA endonuclease that cleaves at a cleavage site outside of the first recognition sequence, wherein the first recognition sequence is positioned within the first DNA adapter such that said first DNA endonuclease will specifically bind to the first recognition sequence and will cleave at a site within a target DNA sequence that is attached to the first DNA adapter; and (ii) a second recognition sequence for a second DNA endonuclease that cleaves at a cleavage site outside of the second recognition sequence, wherein the second recognition sequence is positioned within the first DNA adapter such that said second DNA endonuclease will cleave within or immediately adjacent to the first recognition sequence. In some cases, the first DNA adapter comprises a nucleotide sequence encoding a constant region of a Cas9 sgRNA or a Cas9 targeter RNA. In some cases, the kit includes a vector that includes the first DNA adapter.

[0241] In some cases, the kit includes at least one of: (i) a DNA linker, (ii) two DNA oligonucleotides that hybridize to form said DNA linker, and (iii) a nucleic acid comprising said DNA linker; wherein the DNA linker comprises a nucleotide sequence encoding a constant region of a Cas9 targeter RNA or a Cas9 sgRNA. In some cases, the kit includes a vector that includes the DNA linker. In some cases, the kit includes at least one of: (i) a second DNA adapter, (ii) two DNA oligonucleotides that hybridize to form said second DNA adapter, and (iii) a nucleic acid comprising said second DNA adapter; wherein the second DNA adapter comprises one or more of: (a) an RNA polymerase promoter, (b) a recognition sequence that facilitates cloning, and (c) an overhang. In some cases, the kit includes a vector that includes the second DNA adapter.

[0242] In some cases, the kit includes a nucleic acid that includes the first and second DNA adapters, wherein (i) the nucleic acid is linear and the first and second DNA adapters are positioned on opposite ends of the nucleic acid, or (ii) the nucleic acid is circular and the first and second DNA adapters are positioned adjacent to one another such that cleavage between the first and second DNA adapters will produce a linear nucleic acid in which the first and second DNA adapters are positioned on opposite ends. In some cases, the nucleic acid that includes the first and second DNA adapters is a vector. In some cases, the vector is a viral vector or a plasmid vector.

[0243] In some cases, a subject kit includes a blunting nuclease that removes single stranded DNA overhangs. In some cases, the blunting nuclease is mung bean nuclease.

[0244] In some cases, the first and/or second DNA adapter includes a recognition sequence that can be specifically bound and cleaved by a PAM-recognition DNA endonuclease. In some cases, the first recognition sequence is a recognition sequence for one or more DNA endonucleases selected from the group consisting of: MmeI, NmeAIII, and BsbI. In some cases, the first recognition sequence is a recognition sequence for MmeI. In some cases, the second recognition sequence is a recognition sequence for BsaXI.

[0245] In some cases, a subject kit includes one or both of: (i) the first DNA endonuclease, and (ii) the second DNA endonuclease. In some cases, the first DNA endonuclease cleaves at a cleavage site that is 17 to 30 nucleotides from the first recognition sequence. In some cases, the first DNA endonuclease is selected from the group consisting of: MmeI, NmeAIII, and BsbI. In some cases, the first DNA endonuclease is MmeI. In some cases, the second DNA endonuclease cleaves at a cleavage site that is 1 to 20 nucleotides from the second recognition sequence. In some cases, the second DNA endonuclease is BsaXI.

[0246] In some cases, a subject kit includes one or more PAM-recognition DNA endonucleases that each specifically binds to and cleaves within a recognition sequence that includes a Cas9 PAM sequence. In some cases, a subject kit includes two or more PAM-recognition DNA endonucleases that each specifically binds to and cleaves within a recognition sequence that includes a Cas9 PAM sequence. In some cases, a subject kit includes three or more PAM-recognition DNA endonucleases that each specifically binds to and cleaves within a recognition sequence that includes a Cas9 PAM sequence. In some cases, a kit includes the PAM-recognition DNA endonucleases BfaI, HpaII, and ScrFI. In some cases, the PAM-recognition DNA endonucleases are selected from the group consisting of: BfaI, HpaII, ScrFI, MspI, BstNI, NciI, BsiSI, HapII, MaeI, XspI, AsuC2I, BcnI, BpuMI, CauII, BciT130I, BptI, BseBI, BsiLI, Bst2UI, BstOI, MvaI, Bme1390I, BmrFI, and MspR9I.

[0247] In addition to above-mentioned components, a subject kit can further include instructions for using the components of the kit to practice the subject methods. The instructions for practicing the subject methods are generally recorded on a suitable recording medium. For example, the instructions may be printed on a substrate, such as paper or plastic, etc. As such, the instructions may be present in the kits as a package insert, in the labeling of the container of the kit or components thereof (i.e., associated with the packaging or subpackaging) etc. In other embodiments, the instructions are present as an electronic storage data file present on a suitable computer readable storage medium, e.g. CD-ROM, diskette, flash drive, etc. In yet other embodiments, the actual instructions are not present in the kit, but means for obtaining the instructions from a remote source, e.g. via the internet, are provided. An example of this embodiment is a kit that includes a web address where the instructions can be viewed and/or from which the instructions can be downloaded. As with the instructions, this means for obtaining the instructions is recorded on a suitable substrate.

[0248] Utility

[0249] There are several utilities of any of the libraries generated using the methods described herein. For example, the subject methods, kits, and compositions facilitate the production and/or isolation of guide RNAs that target DNA for which no DNA sequence is available. In such cases, guide RNAs can be produced that target nearly every available target site in DNA (e.g., a genome/exome of an uncharacterized organism), and this can be accomplished without having any sequence information whatsoever. The guide RNAs can be used to guide a CRISPR/Cas protein (e.g., Cas9) to sites within the genome with the purpose of cleaving at the target site (e.g., double strand break, single strand break), and perhaps causing a genetic mutation at that site. Such a library can be used to functionally screen an entire genome, or perhaps a particular region of the genome (e.g., a particular chromosome), depending on the starting DNA material used. Thus, the guide RNAs that can be generated from such libraries can be used separately (e.g., one at a time) for such screens (i.e., each cell or organism tested could have one, or perhaps a pool, of guide RNAs that were generated by the library). Once a particular “hit” (e.g., phenotype of interest) is identified, the DNA used to generate that particular guide RNA can be identified (e.g., via sequencing that DNA). Because so many guide RNAs can be generated using the subject methods, clusters of “hits” using guide RNAs that target the same gene may aid in the identification of the targeted gene.

[0250] In other cases, multiple guide RNAs can be used together in applications where the target DNA is not modified. For example, in some cases the CRISPR/Cas enzyme that is used (e.g., Cas9) is enzymatically inactive (e.g., dCas9) or is at least nuclease defective such that it does not cleave the target DNA. In such cases, the enzyme itself (e.g., dCas9) can be labeled (e.g., with a fluorescent protein such as neon, GFP, RFP, etc. as exemplified below), thus allowing visualization of the target DNA. For example, the starting material (target DNA) used can be from one or more chromosomes from a particular organism and the generated guide RNAs will thus allow for the visualization of that particular chromosome (e.g., in living cells). The utilities listed above represent just a small sample of the practical uses of libraries generated using the methods, compositions, and kits described herein.

### EXAMPLES

[0251] The following examples are put forth so as to provide those of ordinary skill in the art with a complete disclosure and description of how to make and use the present invention, and are not intended to limit the scope of what the inventors regard as their invention nor are they intended to represent that the experiments below are all or the only experiments performed. Efforts have been made to ensure accuracy with respect to numbers used (e.g. amounts, temperature, etc.) but some experimental errors and deviations should be accounted for. Unless indicated otherwise, parts are parts by weight, molecular weight is weight average molecular weight, temperature is in degrees Celsius, and pressure is at or near atmospheric. Standard abbreviations may be used, e.g., bp, base pair(s); kb, kilobase(s); pl, picoliter(s); s or sec, second(s); min, minute(s); h or hr, hour(s); aa, amino acid(s); kb, kilobase(s); bp, base pair(s); nt, nucleotide(s); i.m., intramuscular(ly); i.p., intraperitoneal(ly); s.c., subcutaneous(ly); and the like.

### Example: 1 Generation of a Library of DNA Molecules Encoding Cas9 Guide RNAs

[0252] Although it is theoretically possible to generate large numbers (e.g., many thousands) of guide RNAs, the complexity and cost of oligonucleotide synthesis makes this approach impractical for most laboratories. Similarly, genome-wide screening libraries are available for some well-studied organisms, but generation of such libraries by oligonucleotide synthesis approaches is unlikely to be cost-effective for many other organisms otherwise amenable to CRISPR-mediated screens, or for which genome data is not yet available.

[0253] The data here describe an approach for generating large numbers of diverse guide RNAs for studies using a CRISPR-based system (e.g., to label specific sequences on chromosomes, for screening a targeted mutagenesis library, etc.). Demonstrating the ability to generate a library of DNA molecules encoding Cas9 targeter RNAs or Cas9 single guide RNAs (sgRNAs) from an arbitrary source of DNA, the methods described herein were used to generate a Cas9 guide RNA library from: (i) Xenopus to use the CRISPR-Cas9 system to label chromosomes in egg extracts, and (ii) a prokaryotic genome.

[0254] Design

[0255] To label chromosomes in vitro, we expressed and purified recombinant nuclease deficient Cas9 (dCas9) fused to mNeonGreen, the brightest green/yellow fluorescent protein yet described (Shaner et al., 2013) (FIG. 1A). The dCas9-Neon protein was complexed with 7 sgRNAs designed against the RHM2 745 base pair (bp) multiple-locus tandem repeat, present at a mean of ˜2000 copies near the centromere of most Xenopus laevis chromosomes (Freeman and Rayburn, 2005; Meyerhof et al., 1983) (Table 1, Table 2). A big advantage of using Xenopus extract is that it can be biochemically manipulated and the cell cycle state controlled (FIG. 5). We followed the dynamics of mitotic chromatid formation by time-lapse fluorescence microscopy by adding sperm nuclei to metaphase-arrested egg extract that has been ultracentrifuged to remove membranes. During this reaction, sperm chromatin remodels and individual chromatids resolve from one another. Upon addition of RHM2/dCas9-Neon probes, puncta formed in numbers in agreement with that expected from published in situ hybridization data (Freeman and Rayburn, 2005; Meyerhof et al., 1983); chromatids with distinct foci could be seen individualizing and separating from the chromosome mass within 10 minutes (FIG. 1B and FIG. 6). In crude extracts that support transit through the cell cycle, RHM2 labeling was maintained on mitotic chromosomes as the spindle formed, and probes were visible at the metaphase plate (FIG. 1C). Two other classes of repeat were labeled in the same way with patterns in agreement with published data (FIG. 1D) (Bassham et al., 1998; Hummel et al., 1984). Simultaneous dual-color labeling of two classes of repeats was also possible (FIG. 1E).

[0256] For labeling non-repetitive loci, we reasoned that potentially any DNA sequence could be enzymatically processed into a library of sgRNAs and used to tile along a chromosomal region. The constraints imposed by the S. pyogenes CRISPR system are that a targeted sequence must be approximately 20 nucleotides (nt) in length and immediately 5′ to a “PAM”, or protospacer adjacent motif consisting of an NAG or NGG triplet. We designed a strategy to extract PAM-proximal sequences by digesting input DNA with restriction enzymes targeting immediately 5′ to an NGG or NAG (see details in Materials and Methods). The resulting fragments are ligated to an adapter containing a recognition site for the restriction enzyme MmeI, which cuts 20-21 nt 5′. Finally, we removed the adapter and ligated the resulting fragments to a 5′ RNA polymerase promoter for in vitro transcription and a 93 nt 3′ sgRNA Cas9 hairpin (FIG. 2A). We first evaluated the effectiveness of the digestion/ligation protocol in CRISPR imaging on the RHM2 repeat amplified by PCR and found that the probes gave similar labeling patterns as the traditionally designed guides (FIG. 2B, compare to FIG. 1B and FIG. 1D).

[0257] To label arbitrary, non-repetitive regions of the genome, we PCR-amplified specific subsequences within a 3.4 megabase (MB) region on chromosome 4 of the X. laevis genome. These subsequences represent 144 regions from 316 bp to 4088 bp in length that, when amplified, pooled and digested as described above are predicted to produce guides with minimal off-target effects (Table 3). The extent of off-target effects was predicted using a previously published scoring algorithm that determines the number and location of mismatches within guide target sequences when aligned to the entire genome (Hsu et al., 2013). A guide with no predicted off-target binding is scored as 100 in this scheme. We picked a threshold of 95, at which no perfect matches are found elsewhere in the genome and the closest matches differ at positions that would strongly impair guide recognition (FIG. 3A). We obtained 100 PCR products (see FIG. 7), which we expected to yield 1,276 guides when all products were pooled and subjected to the digestion/ligation library protocol. After enzymatically processing the PCR products as outlined above, the final pooled library was transcribed in vitro using T7 RNA polymerase (see detailed protocol in Supplemental Files).

TABLE 1
Features of Xenopus repetitive sequences
targeted in FIG. 1A-1E and FIG. 6.

| | | | | Repeat | |
|---|---|---|---|---|---|
| Repeat | GenBank | | Number of | unit | Refer- |
| name | ID | Location | copies | length | ence |
| Telomeres | | Chromo- | Total 10- | 6 bp | 14 |
| | | some | 50 kb/ | | |
| | | ends | chromosome | | |
| RHM2/ | X00036 | Near | 10,000- | 745 bp | 15, 16 |
| Satellite | | centromeres | 30,000 | | |
| 1 | | of ~65% | (1.35% of | | |
| | | of chromo- | total DNA). | | |
| | | somes | Mean ~1,000- | | |
| | | | 3000/locus. | | |
| REM3 | X00680 | Reported | 1,200 | 469 bp | 17 |
| | | as near | | | |
| | | centromere | | | |
| | | of chromo- | | | |
| | | some 1 | | | |

TABLE 2
Targeting sequences used to label repetitive
X. laevis loci.

| Target | Sequence | SEQ ID NO: |
|---|---|---|
| Telomere | GGTTAGGGTTAGGGTTAGGGTT | 1107 |
| RHM2 #1 | GTAGAGTACGCTCTTGATTG | 1108 |
| RHM2 #2 | GATTCTGCCGAAAAGAAAGT | 1109 |
| RHM2 #3 | GGTGACTTTTCAGGTTTCTTTA | 1110 |
| RHM2 #4 | GGCTCTTTTAGGACTGGGCCTC | 1111 |
| RHM2 #5 | GGGAATCGAACCCACAACCTTT | 1112 |
| RHM2 #6 | GGACAGCCCCAGTTGGAAAAAG | 1113 |
| RHM2 #7 | GGCCTGAAGTAGAAGTACATAG | 1114 |
| REM3 #1 | GGAAAGGGTAGGGTTTCCCT | 1115 |
| REM3 #2 | GGTTACATGCTCAACCAAAG | 1116 |
| REM3 #3 | GGTCCATCATCCATCATAGC | 1117 |
| REM3 #4 | GGATGATATGCTTAACCAAC | 1118 |
| REM3 #5 | GGGGGTGGGTCCCTTTGTAG | 1119 |
| REM3 #6 | GGCCTTAATAGTCAATTGCT | 1120 |
| REM3 #7 | GGTTTAGAATTTGAATGTGA | 1121 |

The variable portion of sgRNAs generated by in vitro transcription (IVT) from DNA templates is shown.

[0258] FIG. 1A-1E. Repetitive genomic loci can be visualized using dCas9-Neon in Xenopus egg extracts. (FIG. 1A) dCas9-Neon is programmed to label specific genomic loci by conjugation to an sgRNA molecule containing a complementary target sequence. See also FIG. 5. (FIG. 1B) dCas9-Neon programmed using RHM2 sgRNA (black) localizes rapidly to loci in sperm nuclei (Sytox Orange dye, magenta). Time (min) after imaging started is indicated in the top left of each image. See also Supplementary Movie 1 and FIG. 6. (FIG. 1C) Labeled RHM2 loci (green) are maintained following formation of a mitotic spindle (red). (FIG. 1D) Three examples of repeat classes labeled on sperm nuclei in Xenopus egg extract (1n=18). Left: RHM2 is a centromere-proximal locus on ˜65% of chromosomes (Freeman and Rayburn, 2005). Middle: Telomere repeats target chromosome termini Right: REM3 is reported to target a single centromere-proximal locus on chromosome 1, appearing here as two spots (Hummel et al., 1984). (FIG. 1E) Left: Sperm nuclei driven into interphase in the presence of dCas9-tdTomato Telomere sgRNA and dCas9-Neon RHM2 sgRNA demonstrate simultaneous dual-color labeling (scale bar, 5 μm). Right: A subset of RHM2 and telomere loci appear to co-localize, while others do not (scale bars 10 μm, except magnification in FIG. 1E, 1 μm).

[0259] FIG. 2A-2B. An enzymatically generated guide library can program dCas9-Neon labeling of a repetitive locus. (FIG. 2A) Outline of enzymatic library generation approach. (FIG. 2B) dCas9-Neon programmed using an RHM2 repeat unit processed with this method localizes in a labeling pattern similar to that seen for RHM2 in FIG. 1B and FIG. 1D (scale bar, 5 μm).

[0260] FIG. 3A-3C. A single 3.4 MB locus can be labeled using an enzymatically generated guide library. (FIG. 3A) Specificity score distribution for all guides predicted to be generated by subjecting 3.4 MB region to procedure outlined in FIG. 2A. Only sub-regions predicted to generate guides with a score of ≥95 were used as PCR templates for library construction. (FIG. 3B) Processing of 100 PCR products (See FIG. 7) spanning regions within a 3.4 MB region of X. laevis chromosome 4 generates a single labeled spot in haploid sperm nuclei (scale bar, 5 μm). (FIG. 3C) Count of fluorescent foci per sperm nucleus when incubated with 3.4 MB library. n=3 experiments, 11-13 nuclei scored per experiment. Bars are ±standard deviation. See also FIG. 7

[0261] FIG. 4A-4F. A complex guide library targeting sequences within the E. coli genome. (FIG. 4A) Comparison of theoretical maximum number of guides generated by E. coli genome digestion with guides identified by sequencing (black text) and of sequencing reads that represent expected guides versus those reads that do not correctly target E. coli PAM-adjacent 20mers (blue text). (FIG. 4B) Length distribution of variable spacers (region between T7 promoter and sgRNA guide body) in library as determined by high-throughput sequencing. (FIG. 4C) Distribution of abundance of unique guides within library. (FIG. 4D) Coverage of selected GO-term gene groups by library sgRNAs compared to the total number of genes annotated by those GO terms. (FIG. 4E) Analysis of genes targeted by guides in sequenced library as binned by gene length. (FIG. 4F) In silico analysis of guide specificity as predicted to be produced by digestion/ligation of E. coli genomic DNA. A score of 100 indicates no predicted off-target effects.

[0262] FIG. 5. Xenopus egg extract allows study of cell cycle chromosome events in vitro. Left: Sperm nuclei are cycled into interphase in crude extracts by the addition of calcium, which induces nuclear envelope formation and DNA replication. Interphase nuclei can then be driven into a mitotic state by adding additional mitotically-arrested extract. Right: Ultracentrifuged crude egg extract supports remodeling of sperm chromatin into individualized mitotic chromatids, but do not support mitotic spindle assembly.

[0263] FIG. 6. Repetitive genomic loci can be visualized using dCas9-Neon. Re-scaled and enlarged image from FIG. 1B (10 m 30 s timepoint) showing individual channels.

[0264] FIG. 7. DNA source for enzymatic construction of guide library used to label 3.4 MB region. 1% Agarose gels showing PCR products pooled and used in library assembly. Primers used to generate PCR products are shown in Table 3.

TABLE 3
PCR primers used for amplifying 3.4 MB region of X. laevis for locus labeling.

| | Amplicon | | | | | |
|---|---|---|---|---|---|---|
| | position | | | | | |
| | on | | | | | |
| | Scaffold | | | | Product | Guides |
| | 102974 | Forward primer | Reverse primer | SEQ ID NO | length | contained |
| 1 | 19100468 | AGGGGTGTCCAGAAGATT | AAAGACCAAAGAGGGAGG | 1122, 1266 | 4088 | 12 |
| 2 | 21447709 | TGGAACTATCAGCCCTGA | CGGGGAGAATAGTGGATT | 1123, 1267 | 3594 | 32 |
| 3 | 19991274 | GGTTCCGGTACCAGTGTGTATA | ATATTGGCACCGGGGACT | 1124, 1268 | 3230 | 23 |
| 4 | 18505915 | ACACTCGACCTGTCCTTATG | TAATTGAACCAGGCGTTG | 1125, 1269 | 2905 | 17 |
| 5 | 18663621 | TCTCATGTGTCTCCTTGC | GTTCTGCTAGTGACAGGTCT | 1126, 1270 | 2660 | 13 |
| 6 | 21065410 | GTAAATCGATTCTAAATTCGG | CAGATGTGGTAGACTTGTCTG | 1127, 1271 | 2638 | 10 |
| 7 | 18909500 | CAACCTGTGCCTAAATGC | TTTATGGCACTGACACCC | 1128, 1272 | 2612 | 12 |
| 8 | 19947076 | CCCCCTCTCTAATTACAGCT | AGTTTTACACCCGGATCC | 1129, 1273 | 2600 | 10 |
| 9 | 21221279 | CCCAACTTGGTCCTTAATAA | CAGCGTGCCTTTAAGAAC | 1130, 1274 | 2450 | 14 |
| 10 | 20078715 | ACTCGTCTGGCGCATTTC | GTCGCTGTTAAACCCCATGT | 1131, 1275 | 2444 | 10 |
| 11 | 18963570 | GGACTGTCTTTATCGGCA | TGGATCCTATGCCGTAAC | 1132, 1276 | 2442 | 10 |
| 12 | 20598378 | AGCAGGCTAGACAGACAG | CTTTGGACCCTACTCATG | 1133, 1277 | 2399 | 21 |
| 13 | 20331335 | TCTCCAGCGTGATCATTC | ATGCAGGATGCTAGTGAGAG | 1134, 1278 | 2336 | 15 |
| 14 | 20470442 | GCCTGTGATGTTGGAAAG | ATAATGGGGTTCTGAGGC | 1135, 1279 | 2334 | 14 |
| 15 | 21297377 | CTGCGATGGAAAGATCAG | CCCTTAACTGCCCTGAAT | 1136, 1280 | 2298 | 10 |
| 16 | 21206262 | CITCCTGACAATGCTTGG | AGCCAACATACCTGCTCA | 1137, 1281 | 2143 | 20 |
| 17 | 18974210 | AACGGCATGTAGATGTGGTG | GCACCTAGTGGCACCCAT | 1138, 1282 | 2105 | 19 |
| 18 | 19807524 | TGTCCCTGTTCTTATGGTGG | TATCCACACCCAGGGACC | 1139, 1283 | 2069 | 9 |
| 19 | 19667884 | GCAGGTCGATAACTCATCAC | TATAGATGTCACCGGGCA | 1140, 1284 | 2040 | 22 |
| 20 | 20052309 | CATCAGTGAGCAGAGCTGT | CAGAGGATGTCATCTGTGTG | 1141, 1285 | 1992 | 16 |
| 21 | 19375345 | GATGGCTTCCTTAGTTCACC | GCTATTTTAGCCCCCTTTG | 1142, 1286 | 1952 | 14 |
| 22 | 19045147 | TTCCAGGTTCCTTCATAATG | CCAATACTCCAGGCAACA | 1143, 1287 | 1947 | 14 |
| 23 | 18501608 | CCCTTCCCTTCAAGAATC | GAAAGCTAGCGCAAGAAA | 1144, 1288 | 1934 | 13 |
| 24 | 21417928 | CCATTGACATGAGATTCTCC | GCTCTCCGAATTTCCCTA | 1145, 1289 | 1886 | 16 |
| 25 | 19717872 | TCCAGGGGTGTCTCAGAG | TGTGGAACTAGACTATGGGG | 1146, 1290 | 1838 | 14 |
| 26 | 18926646 | AGCTTGAGGTCATCCACA | GTCCCAACTCTCTCAGATTG | 1147, 1291 | 1825 | 10 |
| 27 | 20915086 | GGGGATGAAACCTTGAAG | TGTCATGTTCTCCTTCCG | 1148, 1292 | 1818 | 18 |
| 28 | 21307202 | AGCTAGGCTTGAACTGGAA | CTCACCAGGTCTGCTTCA | 1149, 1293 | 1814 | 16 |
| 29 | 18622362 | GTCATGGACCTAATCTTCA | CAATATATTGCTAGGGGG | 1150, 1294 | 1813 | 11 |
| 30 | 20251445 | ACGCCACTGTTGCTAAGA | TACACCACTTTGCTGCCT | 1151, 1295 | 1772 | 12 |
| 31 | 20306765 | AAGGAGTGCAGCAATCTG | CAGATCCCGAAGATTGTG | 1152, 1296 | 1759 | 16 |
| 32 | 20490926 | ATCTAGTGCAGGTGCCACT | GTCGTGCGAATTGAAGTC | 1153, 1297 | 1756 | 11 |
| 33 | 18586568 | AGATGGAGCTAGATTTGAA | GGTAACATTCATCGGAGT | 1154, 1298 | 1752 | 13 |
| 34 | 20368441 | TTAGGAGGCAGGTCTCAGA | ATCACCGGCCTAATCCAT | 1155, 1299 | 1731 | 13 |
| 35 | 19343527 | GTCCGGATGAAATCCATG | AATAGCTGAGCGCCATGT | 1156, 1300 | 1725 | 13 |
| 36 | 20033830 | CCCAAGTAATGGCCCATAAC | GCAAGCCGTATCCCAAGT | 1157, 1301 | 1668 | 18 |
| 37 | 20049273 | CCAGCACTAGTCGTACTTCA | CTGATAGGATTTGGGCTG | 1158, 1302 | 1666 | 11 |
| 38 | 19868750 | GGGGCTGTACTTGTATGTCT | CACTGGCCAGAGTTTTTC | 1159, 1303 | 1665 | 10 |
| 39 | 21399267 | GGTATACCTAGAGCTTTATGGTG | GGAGAATACCTGGAAGTTTAGA | 1160, 1304 | 1663 | 14 |
| 40 | 20468482 | TCTCTAGTAACCATCAGGGC | GGATGGAAATCTAGATGTTTCT | 1161, 1305 | 1654 | 18 |
| 41 | 18588316 | TTCACTCTTCCTGCATCC | GGAGGCTAGCGTTATTAGC | 1162, 1306 | 1645 | 9 |
| 42 | 18421455 | ATCCATATCCGGCAAAAT | AGGCAGAGATGCAGACAA | 1163, 1307 | 1595 | 9 |
| 43 | 21112602 | ACTCAACACCTGCTTTGG | TGGTTCAGCTCAGGGATA | 1164, 1308 | 1589 | 14 |
| 44 | 21193715 | GCTCTTTAGCACACGATTC | CCTCCAAATGAAGTGACC | 1165, 1309 | 1583 | 22 |
| 45 | 18398783 | GAACCAGTGGGTCAAAAA | CAGCCCACACAGACTAAA | 1166, 1310 | 1568 | 10 |
| 46 | 19295732 | GTGGATCTGTGCCCTAAA | GACAACTGCAGGATCGAT | 1167, 1311 | 1566 | 10 |
| 47 | 20261589 | TTCCTTCCTCGGAAGTTC | TGTTAATGGGTCTCTCTTGG | 1168, 1312 | 1554 | 12 |
| 48 | 19351820 | AGAACCGGTCAGGCCTTCAT | CTGCCGCCTGGTCAAAAA | 1169, 1313 | 826 | 18 |
| 49 | 20613373 | GCCCCAGAATCTTAACGT | TTGGGTAGAGGGACACTATG | 1170, 1314 | 1540 | 12 |
| 50 | 21179635 | GCCCCCTAGTTTATTAACC | TGCAGGTGACATAGCACT | 1171, 1315 | 1528 | 11 |
| 51 | 20476167 | CTCCTAGATCCCCCTACATT | CCTTCTCACAAGACAGTTCC | 1172, 1316 | 1521 | 11 |
| 52 | 18243269 | CCCTAGGCCAGTATAGGAT | GAAAGATATTGTCCCCCTC | 1173, 1317 | 1517 | 13 |
| 53 | 20068811 | CGTAGGATCCATCGATGA | GCGACTTGATTCCTTGTG | 1174, 1318 | 1509 | 10 |
| 54 | 19804952 | TGTTCTTAGGACAGTAGGGC | TCCCTTGCTACCTTGTTG | 1175, 1319 | 1484 | 12 |
| 55 | 20242549 | TGCTCTAGCATCAATGGAT | GGTTTCTTGCAGTTACCG | 1176, 1320 | 1466 | 11 |
| 56 | 20279182 | TGGTTGGACCTTCACTTG | TATGTGGGTGTTCAAGGC | 1177, 1321 | 1466 | 10 |
| 57 | 20244393 | CTGGACTCTAGGTTAGCTTTACA | ATGGGCCATTTCAGGTAT | 1178, 1322 | 1444 | 19 |
| 58 | 21468108 | ATTCGTCACTGGGGGACT | GGGGATGATAGCAGCTACAA | 1179, 1323 | 1409 | 10 |
| 59 | 18289194 | AATGCACCGTATAATAGGTT | CTGGGCACTATATAGTCAGAC | 1180, 1324 | 1400 | 10 |
| 60 | 19665648 | GCTGTCCATTGTGAGTCTAC | GCAACCTGGAGTCCATAT | 1181, 1325 | 1399 | 11 |
| 61 | 18320870 | AACTAGTGCAGCTTCCAAGG | GACCAAGTGGCAAAAACG | 1182, 1326 | 1395 | 9 |
| 62 | 19347477 | ATGTTGTGGGTCAGATGC | GTTGGATCACCTGTGCAT | 1183, 1327 | 1389 | 10 |
| 63 | 20216137 | TTGTCACGTTAGTTCCCC | GGGGAGATTCCACACTTT | 1184, 1328 | 1373 | 22 |
| 64 | 21116309 | GAGGTCCATTGGTCCATT | AAGGCTGGTTGGAGTCAT | 1185, 1329 | 1363 | 12 |
| 65 | 19763296 | AGCTATCCGCTCATCACA | ACTGAGTGCAGGTTCTGTCT | 1186, 1330 | 1362 | 12 |
| 66 | 19098872 | GTTTTTCCCTAAGCCGAG | GACCCTTTTTAGGTGACCA | 1187, 1331 | 1361 | 10 |
| 67 | 21163618 | GAGAGCAGTAATTACCATAAGCC | AAAGGTTTTGGGGGACTC | 1188, 1332 | 1358 | 16 |
| 68 | 20321060 | CCCCTAGTCTTCACATTCC | TGTCCCCTCTTTGCTATG | 1189, 1333 | 1355 | 13 |
| 69 | 18677446 | TCAGACCATGGTCAGTAAGAC | GCCTATATTGTACTGCGGAG | 1190, 1334 | 1322 | 12 |
| 70 | 20444089 | CTGCCTGATTAATTGAACC | GACATTCGAGTTTCAGAGG | 1191, 1335 | 1320 | 10 |
| 71 | 19621992 | CCCAGTGGTTTCTATGGA | GATGTCCTCAGAGCTGTTG | 1192, 1336 | 1311 | 12 |
| 72 | 20578164 | TAGGCCTTGGCACTTAAG | TGCTTGACAACTAGGTTTTG | 1193, 1337 | 1309 | 15 |
| 73 | 19588844 | CATGTAGGAAGGACCGTAAG | GAAGACTTACAGTTGCCCTG | 1194, 1338 | 1305 | 9 |
| 74 | 20333650 | TCCTGCATTTGTCCTAGGA | GAAACACCGGGCTCATTG | 1195, 1339 | 1302 | 11 |
| 75 | 18432211 | CTGCTAGGCCAGTTTTGA | GGGGATCTTTATTGCCTAG | 1196, 1340 | 1294 | 12 |
| 76 | 20878833 | ATTGGGCTCACTGAGGAT | CCACATACTAGCGCTATTGAG | 1197, 1341 | 1289 | 15 |
| 77 | 20192536 | TGCTGCGAGTGTCAGTTA | TGTTATCCAGGGAGGTCA | 1198, 1342 | 1258 | 11 |
| 78 | 20648181 | CTGTTCTAGAGGCTGGAACA | CCCTCCAGCCTTAAAGTAAG | 1199, 1343 | 1246 | 13 |
| 79 | 18493381 | CAGAAGCCCAGGTAGACTAA | ACAGCACTCAGGGATCAA | 1200, 1344 | 1244 | 13 |
| 80 | 19884996 | CCAGCCGCTTCTACTTTT | CAGTAAAACCCAGTGGCA | 1201, 1345 | 1235 | 14 |
| 81 | 20457042 | TTAGAGCTCACAGGGGAA | GGAACCAGGTGAAAAACA | 1202, 1346 | 1235 | 13 |
| 82 | 19092047 | AAACATTCCTCCGAGCTC | CAACTGTTTAACCAGCGC | 1203, 1347 | 1229 | 16 |
| 83 | 19095805 | ATAGTTCCCAGGTGTGAGC | TCCTGCTAGTCAAGTCTGC | 1204, 1348 | 1229 | 12 |
| 84 | 20393284 | AGCGTTCCACCTCCTTTA | AGGATTGGTTTCTGGTGG | 1205, 1349 | 1195 | 14 |
| 85 | 18428914 | CACTCGGTGATTCTGTTG | TCTCTCTCTCTCTCTCTCTGTG | 1206, 1350 | 1180 | 12 |
| 86 | 20287144 | AAATCACTGCGCTACGTG | AACTCCCAACTTTCCCCT | 1207, 1351 | 1154 | 14 |
| 87 | 19706910 | GCAGGAATGTAGGAATGC | TCACTGAGCTAGTTCATTGG | 1208, 1352 | 1140 | 9 |
| 88 | 19465183 | GAGGGTTGAGCCAAAAGT | GCTTTGAACGAGACATGG | 1209, 1353 | 1135 | 14 |
| 89 | 19131516 | TGCAAACTAGGTAACGAGC | CTCAAGCAAGGTGGAAAC | 1210, 1354 | 1106 | 11 |
| 90 | 19227852 | CCTGTGCTAGTCTTAAGGTCCA | ACCTTCAAGCCGGGCTTC | 1211, 1355 | 1087 | 15 |
| 91 | 18205596 | CGGCAAAAGAGTGATCTAG | AGCAATCATTAGGACCTCA | 1212, 1356 | 1084 | 11 |
| 92 | 20646719 | ACCGAATCCTACTGCATC | TCTCTCATCACTAGGGCC | 1213, 1357 | 1065 | 11 |
| 93 | 19221905 | ACCAGCTTTCATGGTGAC | GCCTATGACAAGTGTTTGC | 1214, 1358 | 1058 | 12 |
| 94 | 19995725 | TGTGCACTAAGCCACATG | TCATCACTGCCCGTAACT | 1215, 1359 | 1023 | 10 |
| 95 | 19429847 | TGGCTAGCATTTCTGAGG | TGGTGTAGCGTGAAACCT | 1216, 1360 | 998 | 9 |
| 96 | 20479566 | GCACCACCATTCAACATTGC | GGTAACCACCGGGCACTG | 1217, 1361 | 997 | 10 |
| 97 | 21315006 | GTACTAGTGCGTTTTACCCAG | GGGCCAGAATAACTCACA | 1218, 1362 | 992 | 15 |
| 98 | 18575559 | TGCTGGTCATGGATTCAC | GCTTCTGTCTAGATCCTTCACA | 1219, 1363 | 985 | 13 |
| 99 | 18555885 | TAAGATTGACACCCCTGC | TGGGATGTCCACAGATCT | 1220, 1364 | 980 | 14 |
| 100 | 18684266 | CACAGTTGCTGGGATAGA | CAGCTCCTGGATATCCTAT | 1221, 1365 | 980 | 9 |
| 101 | 19612841 | AAACGATGCTTCTCCCAG | GCTGCTGGGTATTTCCAT | 1222, 1366 | 979 | 10 |
| 102 | 19847602 | CCAGGTTTCACCGGCAAA | CCAGCCACTGAGGGCTTATTAA | 1223, 1367 | 973 | 12 |
| 103 | 20382290 | CGTGATCATCCCTAGTAAACC | GCGACAAAATAGTCCCGT | 1224, 1368 | 955 | 11 |
| 104 | 19881338 | CCGATAACTTCTCACTCACC | CACTGTGTGTTATGGCGA | 1225, 1369 | 951 | 20 |
| 105 | 19441684 | GGGCTGTGCTTTATCCAT | CTCTCCAGGTCCCTTGAC | 1226, 1370 | 943 | 9 |
| 106 | 19886579 | TGCTTTGCCTGTGCGCTAA | TGCACCGGAGCTCACACA | 1227, 1371 | 939 | 15 |
| 107 | 18886333 | TCTTGCCAATGACTACCG | CGAGGTTGTAACTCTGCTGT | 1228, 1372 | 931 | 14 |
| 108 | 18136707 | ACTTTAGACTAGGGTAATGC | GGGCAAAGAGTTAGGTAC | 1229, 1373 | 929 | 9 |
| 109 | 20397645 | GCCTGGTTCCTACTGGTAC | TCATCCGGAGCAACAGTA | 1230, 1374 | 891 | 12 |
| 110 | 21075883 | TCGCCCGTGTTTGTTGTA | TGCTGACCCTGTGCCTAA | 1231, 1375 | 886 | 10 |
| 111 | 20827899 | CCCAACCACCCTTGTTTT | CAACATGTCCAGGCTTGG | 1232, 1376 | 875 | 11 |
| 112 | 21190026 | ATATAGTTGGGGGCCAGTAG | CCATTGTCAACCTGCAAC | 1233, 1377 | 867 | 14 |
| 113 | 18402088 | AGGGAGGCTGAATAATGG | TATAGCGATGAAGCTGCC | 1234, 1378 | 850 | 10 |
| 114 | 19188468 | GGAGGAATGGTCAGTACTGA | ACATCTTTTCTGGCGACA | 1235, 1379 | 841 | 14 |
| 115 | 21001588 | CCCTGTCCTAGAGATTAGTGG | AGGGAGACAAGAACCAGACT | 1236, 1380 | 804 | 11 |
| 116 | 21505465 | TGGCCCTAGGGAGGTTTT | ACCACGGACTGGGAATTACT | 1237, 1381 | 786 | 13 |
| 117 | 20652115 | GCACTACCATTCATGCAT | TCTATGTGTTCTAGCGGT | 1238, 1382 | 779 | 11 |
| 118 | 18355668 | CCTTACTCAAAAGCTAGAATG | CGGGATATAAGACCTCCT | 1239, 1383 | 769 | 9 |
| 119 | 18142271 | ACAGTCATGTTGGGCTTC | ATTGAACTAGAGCGCCAG | 1240, 1384 | 765 | 13 |
| 120 | 20400996 | CGGAGAGCTTACATTTCCT | TCAATGCTTCAACCCAGT | 1241, 1385 | 763 | 12 |
| 121 | 20910919 | TACAGATCCCCCTGCAGAA | GCCCTATCTTGGCAGGTTAT | 1242, 1386 | 760 | 10 |
| 122 | 18917993 | GGCTCAAAGGGATGTGAT | TGTACTGACTAGGTGGGGG | 1243, 1387 | 749 | 9 |
| 123 | 20032102 | CTCCAGGCCTTCCATCAC | AAAACTTCCGGTTAATAAGGA | 1244, 1388 | 747 | 10 |
| 124 | 20644574 | AATGTCCCCGGCGATACTT | ATTTCGGGGGTCAGCCTATT | 1245, 1389 | 712 | 12 |
| 125 | 19607163 | CTCATTGGATTCCCGGTC | CATGACCCTGACAAGTCCTA | 1246, 1390 | 697 | 16 |
| 126 | 18841592 | CCAGAGCCAACATTAGGGAA | TGGCCCTGGATGCAGAAT | 1247, 1391 | 625 | 9 |
| 127 | 18377849 | CACTCACCCTATCCTATTCCT | GTACTTTGTGCTGCGATTG | 1248, 1392 | 613 | 10 |
| 128 | 19876043 | GCCGTCAAAACACTGTGT | CATTTCAACCGAAAGCAG | 1249, 1393 | 608 | 10 |
| 129 | 20456451 | TGTGCCTGGAATTCATGT | TGGCTGACCGGATTACTA | 1250, 1394 | 602 | 10 |
| 130 | 20570574 | TCTGTTGCCCAACTGAAG | GGTGTCTCATACAAAGGTGC | 1251, 1395 | 588 | 10 |
| 131 | 20097467 | GAGCCAACGACAACAATC | GATCAGTTCCCTCCCAAT | 1252, 1396 | 579 | 10 |
| 132 | 18121076 | TCACTAATCCTAGCACAGAA | AGCTGATCTGATAGGCTG | 1253, 1397 | 575 | 9 |
| 133 | 18563840 | GGGATGATAAGAAAGCCC | CACAGTCTCCTAGCTACAGAGA | 1254, 1398 | 573 | 9 |
| 134 | 20622480 | CTAGGCAAACATTCTGGC | CCAATGTCCTAGGAGTATCG | 1255, 1399 | 561 | 12 |
| 135 | 18398201 | CTGCATTCCCAGTCTATTCC | TTTATTGCCGGCAAAGAC | 1256, 1400 | 547 | 11 |
| 136 | 20104280 | GAGTCATGACCGATACAC | ATTGACCTGGAAGATAAAT | 1257, 1401 | 538 | 11 |
| 137 | 20503070 | ATCACTAGCAAATGCGGG | GTACCTTGCTGGCTATTCCT | 1258, 1402 | 530 | 13 |
| 138 | 19789340 | AGAGGCACCAGGGAACAA | TCAAGGTGGAGATTGCCA | 1259, 1403 | 486 | 11 |
| 139 | 19472457 | CTAGGAATAAGACCCAGTGC | TCCCCTACTGTGAGATATCC | 1260, 1404 | 477 | 9 |
| 140 | 18818946 | GAAAAACCTTGTGGCCTC | TGGGCATCACACTCATCT | 1261, 1405 | 476 | 10 |
| 141 | 19915825 | TCACAATCTCGTCCTCCA | CAGCCGTAGTCCCAATTT | 1262, 1406 | 409 | 10 |
| 142 | 19834738 | CCTGTAGTGTGATTGAGGCT | ACAGGAGAACCGTGGATT | 1263, 1407 | 389 | |
| 143 | 18609457 | CCGGCCCTAATTAACTGA | GGATGGTATGGCATGATCT | 1264, 1408 | 374 | |
| 144 | 20121562 | CACGCCCTAGTGACTCAC | ATCCTCCTTATTGGCTGG | 1265, 1409 | 316 | |

Amplicon names are the position of the amplicon start on X. laevis Scaffold102974 in Xenbase genome v7.1.

[0265] Results

[0266] When incubated with dCas9-Neon in egg extract, the transcribed pooled PCR product library generated a single major spot in sperm nuclei (FIG. 3B and FIG. 3C), demonstrating that this method provides an innovative, relatively inexpensive, and effective approach for live whole-chromosome labeling.

[0267] Having shown that the molecular approach to generating a library using the digestion/ligation protocol is possible, we explored its utility in making large, complex libraries suitable for use in genome-wide screens by CRISPR-mediated mutagenesis. In order to simplify analysis of the resulting library, we chose to use the well-characterized E. coli genome as a template. We extracted genomic DNA from a cloning strain of E. coli (XL1-Blue) and subjected it to the digestion/ligation protocol detailed above in parallel duplicates. Using publicly available E. coli genome sequence data, we calculated that 80,894 guides could theoretically be generated using this approach (FIG. 4A). High-throughput sequencing of the library revealed 37,854 guides, at mean incidence of one guide for every 112 nt in the E. coli genome, representing ˜44% of the total material sequenced. Of the remaining 56%, 45% of the total material consisted of guides shifted by 1-3 bases 3′ relative to PAMs, likely due to promiscuous activity of Mung-bean nuclease used to blunt fragments. The guides were otherwise consistent with the intended design, containing a T7 promoter followed by a 20-21 nt variable region (FIG. 4B) and terminating with a 93 nt invariant region necessary for Cas9 binding.

[0268] An ideal library is one that exhibits high complexity and is composed of equal numbers of molecules representing each unique guide sequence. However, libraries are subject to deviation from this ideal, due primarily to artifacts introduced during amplification. We analyzed the distribution of unique guide sequences relative to the number of reads obtained in the sequencing data, and found that 90.6% of guides were within 1 standard deviation of the mean abundance and 96.1% of guides were within 2 standard deviations, indicating that only a small proportion of the library content is composed of overrepresented sequences (FIG. 4C). The guide library is predicted to target 3984 of the 4503 genes annotated in the E. coli genome (88%), grouped by GO Term in FIG. 4D. Of the 519 untargeted genes, most are those under 600 nt in length (FIG. 4E). Specificity scoring of all guides indicated that 95.3% of guides predicted to arise from this method have a score of 100/100 (Hsu et al., 2013) indicating that only a single location in the E. coli genome is targeted (FIG. 4F).

[0269] Discussion

[0270] In summary, we have outlined a simple method to label chromosomal loci in living samples without altering the genome, and an approach to CRISPR library generation that can be used to produce probes to track any locus or make complex libraries for other purposes (e.g., functional genomic methods).

[0271] While CRISPR screening libraries generated using synthetic oligonucleotides have been described (Gilbert et al., 2014; Koike-Yusa et al., 2014; Shalem et al., 2014; Wang et al., 2014), so far these libraries target only human and mouse genes. We anticipate that the enzymatic library approach will enable CRISPR-based whole-genome screening in many organisms where oligonucleotide-based design of pooled libraries is undesirable or infeasible for reasons of cost or availability of sequence information. One limitation of our approach is that the precise composition of a guide library cannot be defined as explicitly as it could be in a synthetic oligonucleotide-based library, raising the possibility that individual guides within the library may target more than one location in the genome. We have shown that this is of minimal concern in the small E. coli genome (FIG. 4F). For organisms with larger or unsequenced genomes, the use of a cDNA library rather than total genomic DNA as input is likely to decrease the number of low-specificity guides. Furthermore, most screening strategies can tolerate guides that potentially cut at more than one genomic locus because identification of a “hit” mutation is still possible even if several candidate genomic target sites for an isolated guide must be sequenced.

[0272] Applying this technique in an imaging context for use in intact cells or embryos represents a practical way to monitor chromosome dynamics in vivo, something that has been an unreachable goal for many years. The compositions and methods provided here provide the ability to monitor whole chromosomes in live samples. We note that the 3.4 MB region is visible with a mean labeling density of one guide per 2,664 bp, which is unlikely to affect global chromatin state.

[0273] This approach to generating guide libraries is termed “CRISPR EATING” (for Everything Available Turned Into New Guides) and anticipate the widespread use of complex guide libraries made using it in a many applications.

[0274] Methods

[0275] Protein Purification and Designed Guide RNA Production

[0276] dCas9-Neon was expressed as a 230 kD 6×His-MBP-TEV-dCas9-Neon-Myc fusion protein in BL21 (DE3) Rosetta2 E. coli and affinity purified using Ni-NTA resin, via the N-terminal His tag. The 6×His-MBP portion of the protein was removed by specific proteolysis using TEV protease to yield the 186 kD dCas9-Neon-Myc.

[0277] Xenopus repetitive sequences were scanned for potential dCas9 targeting sites, which included a 5′ GG motif for T7 in vitro transcription (IVT) followed by 18-20 nucleotides (nt) of target sequence and a 3′ NGG/NAG protospacer motif for CRISPR/Cas9 binding (Cong et al., 2013; Hsu et al., 2013) using Unipro UGENE software (Okonechnikov et al., 2012). This strategy was previously employed in generating sgRNAs for use by injection into zebrafish embryos (Hwang et al., 2009). sgRNAs were synthesized from DNA templates generated by annealing of a ˜59 nt 5′ primer containing a T7 RNA polymerase promoter and the desired targeting sequence to an 82 nt 3′ primer containing the necessary invariant sgRNA sequence (Hsu et al., 2013). The 5′ and 3′ primers were annealed over 23 base pairs of reverse-complementarity and extended using a high-fidelity polymerase, resulting in a ˜118 base pair double-stranded substrate for use in in vitro transcription reactions. Resulting 100-102 nt RNAs were folded at 60° C. and combined with dCas9-Neon at 37° C. using 2 μl-5 mg/ml dCas9 with 5 μl IVT reaction product which generally ensured a large molar excess of RNA such that all protein was RNA-bound.

[0278] Xenopus Egg Extract Reactions

[0279] Cytostatic factor-arrested (CSF) cytoplasmic extracts were prepared from freshly laid eggs of X. laevis and used for spindle assembly reactions as described (Hannak and Heald, 2006). Progression through interphase was induced by addition of 0.5 mM CaCl₂ and incubation for 1-2 hours at room temperature. To induce mitotic structures around replicated chromatin, an equal volume of CSF egg extract was then added. High speed metaphase-arrested extracts in which sperm chromatid condensation and resolution occurs were prepared from CSF extracts by centrifugation at 200,000×g as described (Maresca and Heald, 2006).

[0280] Live Imaging

[0281] Flow cells were prepared using clean microscope slides, double-sided sticky tape (Scott) and coverslips which have been cleaned by sonication for 20 min in ddH2O with detergent (Versa), rinsed and sonicated in ddH2O for 20 min and stored in 70% Ethanol until use (Stehbens et al., 2012). 8-10 μl of extract were used per flow cell. Flow cells were sealed with VaLaP (Vaseline/Lanolin/Paraffin 1:1:1). CSF flow cells were prepared at room temperature, high-speed flow cells on ice just prior to imaging. Extracts were observed through a 60× 1.49 NA Nikon Apochromat oil immersion objective on a customized spinning disk confocal microscope, equipped with a MS-2000 motorized stage (Applied Scientific Instrumentation), a Borealis-modified Yokogawa CSU-X1 spinning disk head (Spectral Applied Research), an LMM5 laser merge module (Spectral Applied Research), automated emission filter changer (Sutter Instrument) and environmental control (In Vivo Scientific). This setup has been described in detail previously (Stehbens et al., 2012). Images were acquired on a iXon low-light electron multiplication CCD (EMCCD) camera at exposure times of 20-50 ms with EM gain set to 150-200 and 3 MHz readout mode. Neutral density filters reducing laser power to 25-50% were used throughout imaging. Microscope and camera were controlled by Nikon Elements Software (Nikon) running on a 64-bit Microsoft Windows 7 PC. Images were analyzed using Fiji (Schindelin et al., 2012) and assembled in Illustrator (Adobe). Pearson's correlation coefficient was determined using the Coloc2 plugin in Fiji on Z-projections of confocal image stacks; the Pearson's R value (above threshold) is reported.

[0282] sgRNA Library Construction

[0283] The S. pyogenes Cas9 protospacer-adjacent motif (PAM) consists of an NRG motif, where N is any nucleotide, R is an adenine or guanine nucleotide and G is a guanine nucleotide only. To generate DNA ends that are adjacent to this PAM motif, we employed a restriction enzyme cocktail that recognizes a subset of the possible PAMs within a DNA sequence. HpaII, ScrFI and BfaI recognize the sequences C/CGG, CC/NGG and C/TAG respectively, where “/” indicates the site of phosphodiester backbone cleavage. When a substrate is digested with these enzymes and single-strand overhangs are removed, the remaining dsDNA is that existing immediately 5′ to a CGG, NGG or TAG sequence in the target DNA. To trim these blunt-ended PAM-adjacent substrate fragments to 20 nt, we ligated to them an 82 nt dsDNA adapter containing an MmeI recognition site at each terminus, two internal BsaXI sites and an ScrFI site in the middle of the adapter. Following a ligation reaction, products that represent tandems of the adapter are converted back into 82 nt fragments by ScrFI digestion, and those ligated successfully to substrate fragments are trimmed to 41 nt. The 82 nt fragments are removed by Ampure XP SPRI size-selection. Because the MmeI enzyme cuts 20 nt distant from its binding site at the end of the ligated adapter, desired substrate fragments are trimmed to 20 nt by MmeI digestion, producing a 20 nt substrate fragment 5′ to a 41 nt half-adapter. The resulting fragments are asymmetrical with respect to their single-strand overhangs, with a 2 nt overhang produced by MmeI digestion on one end and a 1 nt overhang produced by ScrFI digestion on the other end. This allows specific ligation of a T7 RNA polymerase promoter to the end produced by MmeI digestion. The T7 RNA polymerase promoter is constructed from two annealed oligonucleotides, one of which has a two nucleotide “NN” (random base) overhang. Following this ligation step, desired fragments now have a T7 promoter, 20 nt of a PAM-adjacent region, and 41 nt of an adapter fragment. To produce the final sgRNA fragment, the adapter portion is removed using BsaXI within the adapter. Because BsaXI cuts outside of its recognition site, the position of the BsaXI site permits complete removal of the adapter portion of guide fragments, leaving only a 3 nt overhang. This overhang is exploited for ligation of a 93 nt fragment containing the sgRNA constant region. The resulting 136 nt fragment thus consists of a T7 RNA polymerase promoter, 20 nt of sequence corresponding to a putative Cas9 targeting site in the substrate DNA sequence, and 93 nt of sgRNA hairpin. To remove unwanted side products of ligation reactions, the 136 nt fragments were amplified by 10 cycles of PCR using primers in the T7 promoter and at the 3′ end of the sgRNA hairpin. The resulting 136 nt band is isolated and purified using DNA-PAGE, whereupon a second round of 10 cycles of PCR amplification is employed to make the final library.

[0284] Computational Selection of Guides Across 3.4 MB Region

[0285] PCR products used to generate the 3.4 MB region labeling library were selected using a custom computational pipeline employing BioPython to simulate substrate digestion (Cock et al., 2009), BLAST a and a previously published CRISPR scoring algorithm to determine high-scoring guides (Altschul et al., 1990; Camacho et al., 2009; Hsu et al., 2013) and Primer 3 (Untergasser et al., 2012) to generate PCR primers that amplify across regions predicted to produce only high-scoring guides (score of ≥95). Full source code is available at “htt” followed by “ps://git” followed by “hub.c” followed by “om/orgs/eati” followed by “ngcrispr/.”

[0286] In brief, Scaffold102974 (approx. 21 MB) of X. laevis genome v 7.1 was subjected to this computational pipeline. From within the Scaffold, a 3.4 MB window containing the largest number of highly specific guides (score of 95+) was used. Within that 3.4 MB region, 144 regions containing only guides meeting this score threshold were selected. PCR primers were designed across these regions. A preparation of X. laevis male liver DNA was used as template, and PCRs were carried out using 2×Q5 HotStart Master Mix (New England Biolabs). PCRs were pooled and subjected to the digestion/ligation library protocol using an extended sgRNA constant region.

[0287] Detailed Protocol Used

[0288] For a schematic illustration of a method encompassing the below, see FIG. 8A. This version of the method does not necessarily require all of the steps below, but the following is an illustration of one way to accomplish such a method.

[0289] Enzymatic CRISPR Library Generation

[0290] Overview:
[0291] 1. Prepare input DNA. Pre-dephosphorylate using rSAP.
[0292] 2. Digest simultaneously using BfaI, HpaII, ScrFI in NEB CutSmart. Use Mung Bean nuclease to remove 5′ overhangs.
[0293] 3. Add MmeI/BsaXI cassette and blunt-ligate.
[0294] 4. Monomerize tandem adapters by AclI/ScrFI digestion. Remove fragments by Ampure XP size selection.
[0295] 5. Cleave with MmeI to create 20mer ends with 2 nt overhang.
[0296] 6. Ligate to annealed T7 fwd oligo containing 2 nt 5′ NN overhang.
[0297] 7. Cleave with BsaXI to remove adapter and generate overhang for sgRNA body ligation
[0298] 8. Ligate to final sgRNA body.
[0299] 9. Amplify from both ends and gel purify complete adapters
[0300] 10. Re-amplify to produce final guide template.

[0301] The following reagents were used: BfaI (R0568S), HpaII (R0171S), ScrFI (R0110S), AclI (R0598S), Mung Bean Nuclease (M0250S), Quick ligation kit (M2200S), MmeI (R0637S), BsaXI (R0609S), rSAP (M0371S), T4 PNK (M0201S), 2×Q5 Hot Start Master Mix (M0494S), 10× CutSmart buffer (shipped with most NEB enzymes), Ampure XP beads (Beckman A63880), DNA Clean and Concentrator Columns (Zymo Research D4004), Oligo Binding Buffer (Zymo Research D4060-1), Dialysis discs (Millipore VSWP04700), GelStar (Lonza 50535), Reagents for 15% TBE-PAGE minigels.

[0302] All DNA purifications were performed using DNA Clean and Concentrator columns unless otherwise specified. In some cases (e.g., to maintain very small fragments), two volumes of Zymo Oligo Binding Buffer can be used in place of DNA Binding Buffer included in DNA Clean and Concentrator kits. Samples can be stored at −20° C. between steps if necessary.

[0303] Linker Preparation

[0304] All linkers can be ordered as oligonucleotides. For Linkers 1 and 3, PAGE purification was used. Phosphorylation of the oligonucleotides was performed using T4 polynucleotide kinase (T4 PNK) (NEB) as per manufacturer's protocol (where specified). Annealing was carried out in 1×CutSmart buffer in a PCR machine that was set to ramp from 98° C. to 20° C. over 60 minutes. All completed adapters were drop-dialyzed against ddH2O (using a dialysis disc) for 20 minutes prior to use.

[0305] Linker 1 (82 nt) (Adapter1) (see FIG. 9A)

[0306] [Each oligo was phosphorylated separately, then the oligos were annealed and the T4 PNK was heat inactivated]

Oligo 1:
(SEQ ID NO: 1)
5'-GTTGGATAGTGT [symbol] [symbol]
ATAGACTAGCTCAGGA [symbol] ATCTTAGATAGTA
ATCA [symbol] [symbol] TAATTCCAAC-3'
Oligo 2 (reverse complement of Oligo 1):
(SEQ ID NO: 2)
5'-GTTGGAATTA [symbol] [symbol]
TGATTACTATCTAAGAT [symbol] TCCTGAGCTAGTCTA
T [symbol] [symbol] ACACTATCCAAC-3'.

[0307] The MmeI sites are underlined only; the BsaXI sites are bold and italic; the ScrFI site is bold, italic, and underlined. The BsaXI sites were used to remove the adapter after use of the MmeI site. BsaXI cuts outside its own recognition site and was positioned to cut within the MmeI sites.

[0308] Linker 2 (23+2 nt) (Adapter 2) (see FIG. 9A)

[0309] [The “bottom” oligonucleotide was phosphorylated, the T4 PNK was heat-inactivate, and then the “bottom” oligo was annealed to the “top” oligo]

| | (SEQ ID NO: 3) |
|---|---|
| Top: 5' gaaatTAATACGACTCACTATAG NN 3' | |
| | (SEQ ID NO: 4) |

Bottom: 5' CTATAGTGAGTCGTATTAatttc 3'

[0310] The T7 RNA Polymerase promoter is underlined (nn indicates degeneracy in the adapter/oligo)

[0311] Linker 3 (90+3 nt) (Adapter 3)(“DNA Linker”)(See FIG. 9A)

[0312] [The “top” oligonucleotide was phosphorylated, the T4 PNK was heat-inactivated, and then the “top” oligo was annealed to the “bottom” oligo]

Top:
(SEQ ID NO: 5)
5' TAAGAGCTATGCTGGAAACAGCATAGCAAGTTTAAATAAGGCTAGTC
CGTTATCAACTTGAAAAAGTGGCACCGAGTCGGTGCTTTTTTT 3'
Bottom:
(SEQ ID NO: 6)
5' AAAAAAAGCACCGACTCGGTGCCACTTTTTCAAGTTGATAACGGACT
AGCCTTATTTAAACTTGCTATGCTGTTTCCAGCATAGCTCTTAAAC 3'

[0313] Protocol Used
[0314] 1. In a PCR tube, combine the following:

| | |
|---|---|
| 10 μl | Input DNA at ~1 μg/μl |
| 5 μl | 10X CutSmart Buffer |
| 30 μl | dH2O |
| 1 μl | rSAP |

[0315] Incubate at 37° C. for 30 minutes. Heat inactivate at 65° C. for 10 minutes. Recover a 1 μl sample; label it 1. This prevents broken DNA from ligating to adapters in subsequent steps.
[0316] 2. Split into 3 tubes. Add the following to each tube:

| | |
|---|---|
| 1.5 μl | HpaII (15 U) |
| 1.5 μl | ScrFI (7.5 U) |
| 1.5 μl | BfaI (15 U) |

[0317] 3. Incubate for ˜1 hr at 37° C. Heat inactivate enzymes, 20 min at 80° C. Purify over 1 column each using two volumes of Oligo Binding Buffer, eluting in 10 μl each.
[0318] 4. In a 50 μl reaction volume containing 2-10 μg DNA in 45 ul water, add 7.5 ul 10× Cutsmart and 2.5 ul MBN reaction buffer. Then, on ice, add 2.5 μl Mung Bean Nuclease to the digested DNA. Incubate in PCR machine at 25° C. for 30 minutes, then cool to 4° C. when done.
[0319] 5. Add 0.5 μl 1% SDS to the reaction to stop MBN digestion.
[0320] 6. Transfer to a 1.5 ml tube and add 100 μl (2 volumes) Oligo Binding Buffer. Split over two Zymo columns and elute in 10 μl each. Expect ˜75 ng/μl each (about 1 μg total). Nanodrop and recover a 0.5 μl sample; label it 2.
[0321] 7. Dialyze sample against ddH2O on dialysis disc for 20 minutes to desalt and improve blunt ligation efficiency.
[0322] 8. For ligations, use extensively dialyzed, phosphorylated MmeI linker (Linker 1):

| | |
|---|---|
| 17 μl | DNA (about 1 to 1.5 μg; equivalent |
| | to 10-15 pmol ends at 300 bp) |
| 1 μl | Linker 1 (at 100 pmol/μl) |
| 18 μl | 2X Quick Ligation Buffer |
| 0.5 μl | Quick Ligase |
| 0.5 μl | T4 PNK |

[0323] 9. Incubate for 30 minutes at RT. (Longer leads to high-molecular-weight products that result in poor recovery from column).
[0324] 10. Add 200 μl (5 volumes) Zymo DNA binding buffer. Split across 2 Zymo columns and elute in 10 μl each. Measure and recover a 0.5 μl sample; label it 3.
[0325] 11. To pooled eluates (about 18 μl), add 2.2 μl Cutsmart, 1 μl ScrFI and 1 μl AclI. Incubate at 37° C. for 30 minutes. Take a sample; label it 4. These enzymes break up tandem adapter products into a ˜40 bp size that's convenient to remove by Ampure selection.
[0326] 12. Make up to 50 μl using 1× Cutsmart (i.e., add 28 μl). Add 1.2 volumes (60 μl) Ampure XP beads. Collect on magnet; wash ×2 with fresh 70% EtOH; dry and elute in 10 μl ddH2O. Expect ˜10 ng/μl. Label it 5.
[0327] 13. Digest using MmeI:

| | |
|---|---|
| 9 μl | DNA |
| 1.3 μl | 10X Cutsmart |
| 0.75 μl | 3.2 mM SAM |
| 1 μl | MmeI |

[0328] 14. Incubate at 37° C. for 1 hour. Inactivate enzyme at 65° C. for 20 minutes. Take a 0.5 μl sample; label it 6. Drop-dialyze against ddH2O 20 mins.
[0329] 15. Ligate to Linker 2 (T7 promoter):

| | |
|---|---|
| 10 μl | DNA (as much as possible) |
| 1 μl | Linker 2 (at ~58.8 pmol/μl; ~5 X molar ratio) |
| 11 μl | 2X Quick Ligation Buffer |
| 0.75 μl | Quick Ligase |

[0330] Incubate for 30 minutes at RT.
[0331] 16. Add 5 volumes Zymo buffer (110 μl) and purify on a Zymo column (input is ˜1.5 μg). Elute in 8 μl. Measure and recover a 0.5 μl sample; label it 7.
[0332] 17. To the ˜7 μl recovered, add 1 μl 10× Cutsmart and 1 μl BsaXI. Incubate at 37° C. for 60 minutes.
[0333] 18. Drop-dialyze samples against ddH2O, 20 minutes. Wash out dialysis drops with additional 5 μl ddH2O. Take a 0.5 μl sample and label it 8.
[0334] 19. Ligate to Linker 3 (sgRNA body):

| | |
|---|---|
| 13 μl | DNA [e.g. 600 ng = 11 pmol] |
| 1 μl | Linker 3 (at 38.1 pmo/μl, this is ~3.5 X molar ratio) |
| 14 μl | 2X Quick Ligation Buffer |
| 0.75 μl | Quick Ligase |

[0335] 20. Add 150 μl (5 volumes) Zymo PCR purification buffer. Purify over a column; elute in 10 μl/column. Nanodrop and recover a 0.5 μl sample; label it 9.
[0336] 21. PCR-amplify ligation product

| | | |
|---|---|---|
| 2 | μl | Ligation product |
| 1.25 | μl | T7 fwd amplification oligo (0.5 μM final) |
| 1.25 | μl | 3′ sgRNA constant region oligo (0.5 μM final) |
| 12.5 | μl | 2X Q5 HotStart Master Mix |
| 8 | μl | ddH2O |

| | | | | |
|---|---|---|---|---|
| 98° C. | 30 | s | | |
| 98° C. | 10 | s | | |
| 59° C. | 30 | s | {close oversize brace} | ×10 |
| 72° C. | 30 | s | | |
| 72° C. | 2 | min | | |

| | |
|---|---|
| 12° C. | inf. |

[0337] 22. Label PCR product sample 10. Run gel to check library for presence of 136 bp band (15% TBE-PAGE minigels)
[0338] 23. Add 20 μl 10×DNA loading dye to ˜22.5 μl remaining PCR product. Run out entirety of PCR product across 4 lanes of a 10-well gel and stain 20 min with two drops of EtBr or (preferably) GelStar in 50 ml buffer.
[0339] 24. Cut out 136 bp band under UV or (preferably) blue light illuminator, place in 0.6 ml tube. Crush gel slice and add 100 μl Crush-and-soak buffer (1 mM EDTA, 0.1% SDS, 0.3M NaAc 5.2). Incubate rotating overnight at room temperature.
[0340] 25. Spin through a 0.2 μm spin filter (3 min, max speed). Wash out incubation tube with 500 μl Zymo DNA binding buffer and spin this through the same filter. Column-purify; elute in 20 μl. If the end-point of ligation of guides into a vector, steps 26-27 may not be necessary.
[0341] 26. Repeat the PCR as step 21, scaled up to 3×50 μl reactions and using 3 μl template for each 50 μl reaction for 12 cycles.
[0342] 27. Purify PCR products over Zymo column and measure concentration.
[0343] 28. Transcribe library using T7 RNA polymerase or phosphorylate and clone into a vector for propagation.
[0344] 29. Troubleshooting: Analyze numbered samples on 15% TBE-PAGE gel to determine presence of DNA, enzyme activity and ligase activity.

### REFERENCES

[0345] Altschul, S. F., Gish, W., Miller, W., Myers, E. W., and Lipman, D. J. (1990). Basic local alignment search tool. J. Mol. Biol. 215, 403-410.
[0346] Bassham, S., Beam, A., and Shampay, J. (1998). Telomere variation in Xenopus laevis. Mol. Cell. Biol. 18, 269-275.
[0347] Camacho, C., Coulouris, G., Avagyan, V., Ma, N., Papadopoulos, J., Bealer, K., and Madden, T. L. (2009). BLAST+: architecture and applications. BMC Bioinformatics 10, 421.
[0348] Chen, B., Gilbert, L. A., Cimini, B. A., Schnitzbauer, J., Zhang, W., Li, G.-W., Park, J., Blackburn, E. H., Weissman, J. S., Qi, L. S., et al. (2013). Dynamic Imaging of Genomic Loci in Living Human Cells by an Optimized CRISPR/Cas System. Cell 155, 1479-1491.
[0349] Cock, P. J. A., Antao, T., Chang, J. T., Chapman, B. A., Cox, C. J., Dalke, A., Friedberg, I., Hamelryck, T., Kauff, F., Wilczynski, B., et al. (2009). Biopython: Freely available Python tools for computational molecular biology and bioinformatics. Bioinformatics 25, 1422-1423.
[0350] Cong, L., Ran, F. A., Cox, D., Lin, S., Barretto, R., Habib, N., Hsu, P. D., Wu, X., Jiang, W., Marraffini, L. A., et al. (2013). Multiplex genome engineering using CRISPR/Cas systems. Science (80-.). 339, 819-823.
[0351] Freeman, J. L., and Rayburn, A. L. (2005). Localization of repetitive DNA sequences on in vitro Xenopus laevis chromosomes by primed in situ labeling (PRINS). J. Hered. 96, 603-606.
[0352] Gilbert, L. A., Larson, M. H., Morsut, L., Liu, Z., Brar, G. A., Torres, S. E., Stern-Ginossar, N., Brandman, O., Whitehead, E. H., Doudna, J. A., et al. (2013). CRISPR-mediated modular RNA-guided regulation of transcription in eukaryotes. Cell 154, 442-451.
[0353] Gilbert, L. A., Horlbeck, M. A., Adamson, B., Villalta, J. E., Chen, Y., Whitehead, E. H., Guimaraes, C., Panning, B., Ploegh, H. L., Bassik, M. C., et al. (2014). Genome-Scale CRISPR-Mediated Control of Gene Repression and Activation. Cell 159, 647-661.
[0354] Hannak, E., and Heald, R. (2006). Investigating mitotic spindle assembly and function in vitro using Xenopus laevis egg extracts. Nat. Protoc. 1, 2305-2314.
[0355] Hsu, P. D., Scott, D. A., Weinstein, J. A., Ran, F. A., Konermann, S., Agarwala, V., Li, Y., Fine, E. J., Wu, X., Shalem, O., et al. (2013). DNA targeting specificity of RNA-guided Cas9 nucleases. Nat. Biotechnol. 31, 827-832.
[0356] Hummel, S., Meyerhof, W., Korge, E., and Knochel, W. (1984). Characterization of highly and moderately repetitive 500 bp Eco RI fragments from Xenopus laevis DNA. Nucleic Acids Res. 12, 4921-4938.
[0357] Hwang, E., Lee, J., Jeong, J., Park, J., Yang, Y., Lim, J., Kim, J., Baek, S., and Kim, K (2009). SUMOylation of RORα potentiates transcriptional activation function. Biochem. Biophys. Res. Commun. 378, 513-517.
[0358] Jinek, M., Chylinski, K., Fonfara, I., Hauer, M., Doudna, J. A., and Charpentier, E. (2012). A programmable dual-RNA-guided DNA endonuclease in adaptive bacterial immunity. Science (80-.). 337, 816-821.
[0359] Jinek, M., East, A., Cheng, A., Lin, S., Ma, E., and Doudna, J. (2013). RNA-programmed genome editing in human cells. Elife 2, e00471.
[0360] Koike-Yusa, H., Li, Y., Tan, E.-P., Velasco-Herrera, M. D. C., and Yusa, K. (2014). Genome-wide recessive genetic screening in mammalian cells with a lentiviral CRISPR-guide RNA library. Nat. Biotechnol. 32, 267-273.
[0361] Maresca, T. J., and Heald, R. (2006). Methods for studying spindle assembly and chromosome condensation in Xenopus egg extracts. Methods Mol. Biol. 322, 459-474.
[0362] Meyerhof, W., Tappeser, B., Korge, E., and Knochel, W. (1983). Satellite DNA from Xenopus laevis: comparative analysis of 745 and 1037 base pair Hind III tandem repeats. Nucleic Acids Res. 11, 6997-7009.
[0363] Okonechnikov, K., Golosova, O., Fursov, M., and Team, U. (2012). Unipro UGENE: a unified bioinformatics toolkit. Bioinformatics 28, 1166-1167.
[0364] Qi, L. S., Larson, M. H., Gilbert, L. A., Doudna, J. A., Weissman, J. S., Arkin, A. P., and Lim, W. A. (2013). Repurposing CRISPR as an RNA-guided platform for sequence-specific control of gene expression. Cell 152, 1173-1183.
[0365] Schindelin, J., Arganda-Carreras, I., Frise, E., Kaynig, V., Longair, M., Pietzsch, T., Preibisch, S., Rueden, C., Saalfeld, S., Schmid, B., et al. (2012). Fiji: an open-source platform for biological-image analysis. Nat. Methods 9, 676-682.
[0366] Shalem, O., Sanjana, N. E., Hartenian, E., Shi, X., Scott, D. A., Mikkelsen, T. S., Heckl, D., Ebert, B. L., Root, D. E., Doench, J. G., et al. (2014). Genome-scale CRISPR-Cas9 knockout screening in human cells. Science (80-.). 343, 84-87.
[0367] Shaner, N. C., Lambert, G. G., Chammas, A., Ni, Y., Cranfill, P. J., Baird, M. A., Sell, B. R., Allen, J. R., Day, R. N., Israelsson, M., et al. (2013). A bright monomeric green fluorescent protein derived from Branchiostoma lanceolatum. Nat. Methods 10, 407-409.
[0368] Stehbens, S., Pemble, H., Murrow, L., and Wittmann, T. (2012). Imaging intracellular protein dynamics by spinning disk confocal microscopy. Methods Enzym. 504, 293-313.
[0369] Untergasser, A., Cutcutache, I., Koressaar, T., Ye, J., Faircloth, B. C., Remm, M., and Rozen, S. G. (2012). Primer3-new capabilities and interfaces. Nucleic Acids Res. 40.
[0370] Wang, T., Wei, J. J., Sabatini, D. M., and Lander, E. S. (2014). Genetic screens in human cells using the CRISPR-Cas9 system. Science (80-.). 343, 80-84.
[0371] Wiedenheft, B., Sternberg, S. H., and Doudna, J. A. (2012). RNA-guided genetic silencing systems in bacteria and archaea. Nature 482, 331-338.

### Example 2: Example Compositions and Methods for Generating a Library of DNA Molecules that Encode a Cas9 Targeter RNA or a Cas9 Single Guide RNA (sgRNA)

[0372] For a schematic illustration of a method encompassing the below, see FIG. 8B; and for specific adapters referred to below see FIG. 9. This version of the method does not necessarily require all of the steps below, but the following is an illustration of one way to accomplish such a method.

[0373] Example Uni-Adapter Protocol

[0374] This protocol uses a first DNA adapter that includes the constant region of a Cas9 targeter RNA or a Cas9 single guide RNA (sgRNA). The DNA molecules generated by the protocol and some of the intermediates are circular. Thus, the efficiency of the attachment steps (e.g., ligation steps) can be increased due to intramolecular ligation instead of intermolecular ligation at one or more steps. The DNA molecules generated by the protocol can be amplified (e.g., via PCR) and the amplified product used directly to generate Cas9 targeter RNAs or Cas9 sgRNA; or the amplified product can be used to clone the library into a vector such as a plasmid vector (a library of transformable plasmids) or viral vector (library of viral vectors).

[0375] Uni-Adapter (Replaces Linker 1 and Linker 3 in the Above Version of the Protocol):

[0376] Adapter 1 (can be a PCR product from vector, can be hybridized oligos, etc.) (see FIG. 9 for details)

[e.g., Oligonucleotide 1]
(SEQ ID NO: 7)
5'-
GTTGGATAGTGTACTGCGGCTCCATAGACTGTTAAGAGCTATGCTGGAAA
CAGCATAGCAAGTTT
AAATAAGGCTAGTCCGTTATCAACTTGAAAAAGTGGCACCGAGTCGGTGC
CCTGCAGCTGCGA
[e.g., Oligonucleotide 2]
(reverse complement of oligo 1)
(SEQ ID NO: 8)
5'-
TCGCAGCTGCAGGGCACCGACTCGGTGCCACTTTTTCAAGTTGATAACG
GACTAGCCTTA
TTTAAACTTGCTATGCTGTTTCCAGCATAGCTCTTAACAGTCTATGGAG
CCGCAGTACAC
TATCCAAC

[0377] Preparation:

[0378] Starting material is a clone of pUC19 with Uni-Adapter sequence cloned in at SmaI site. Phosphorylate the forward primer below using T4 polynucleotide kinase. Using a phosphorylated F primer results in only that end of the PCR product being efficiently ligatable (hemiphosphorylated blunt ligations happen only at a very low frequency—unphosphorylated blunt ends can, to an approximation, be considered unligatable).

[0379] Optional: PCR amplify from plasmid containing this Uni-Adapter using these primers.

(SEQ ID NO: 11)
Forward (phosphorylated): GTTGGATAGTGTACTGCGGCTCC
(SEQ ID NO: 12)
Reverse: TCGCAGCTGCAGGGCACC

[0380] Degeneracy Adapter (Replaces Linker 2 in Original Version)

[0381] Adapter 2 (see FIG. 9 for details)

(SEQ ID NO: 9)
Top: 5' ggtccgacTAATACGACTCACTATAGNN 3'
(SEQ ID NO: 10)
Bottom: 3' acgtccaggctgATTATGCTGAGTGATATC 5'

[0382] Preparation:

[0383] Phosphorylate “bottom” oligonucleotide only. Heat-inactivate T4 PNK and anneal to “top” oligo.

[0384] Protocol Modifications:

[0385] 1. Carry out protocol as previously described up to and including Mung-Bean nuclease blunting.

[0386] 2. Ligate the Uni-Adapter to the blunted input fragments in place of Linker 1.

[0387] 3. Some of the Uni-Adapters will have self-ligated; digest with AclI to deconcatamerize (same is in previous protocol).

[0388] 4. MmeI digest.

[0389] 5. Ligate degeneracy adapter to the 2 nt overhang generated by MmeI digestion.

[0390] 6. Digest with PstI to cut within the Uni-Adapter. This reveals an overhang that is compatible with the free end of the degeneracy adapter.

[0391] 7. Phosphorylate everything in the reaction to ensure that the free end of the degeneracy adapter is now competent to be ligated.

[0392] 8. Ligate to generate circles: Degeneracy Adapter—variable 20mer—Uni-Adapter.

[0393] 9. Treat with shrimp antarctic phosphatase to render all free ends unligatable in the next step.

[0394] 10. Digest the circles with BsaXI. This will “pop out” a 30 nt fragment containing the now unwanted MmeI site and leave a linear molecule with compatible sticky ends at the junction between the variable library 20mer and the start of the guide body.

[0395] 11. Re-ligate circles closed to produce the final DNA molecules guide.

[0396] Optional: PCR amplify using below primers and purify the 142 nt band.
[0397] Primers used:

(SEQ ID NO: 13)
F: CATG [symbol] [symbol] TTCCGACTAATACGACTCACTATAG
(SEQ ID NO: 14)
R: GTCGA [symbol] [symbol] GCACCGACTCGGTGCCA

[0398] SbfI Site

[0399] Anneals to Guide

[0400] Cut PCR product with SbfI to linearize and ligate into pUC19-ΔSbfI (a modified version of pUC19 that removes the SbfI site) at its PstI site. This can be done in the presence of SbfI to deconcatamerize insert guides while ligating (pushes equilibrium to vector+insert, rather than long insert concatamers. Inserts properly ligated to vectors are not cut by SbfI).

[0401] While the present invention has been described with reference to the specific embodiments thereof, it should be understood by those skilled in the art that various changes may be made and equivalents may be substituted without departing from the true spirit and scope of the invention. In addition, many modifications may be made to adapt a particular situation, material, composition of matter, process, process step or steps, to the objective, spirit and scope of the present invention. All such modifications are intended to be within the scope of the claims appended hereto.

The application's sequence listing, which the Patent Office published only in electronic form, follows.

SEQUENCE LISTING (1409 sequences)

SEQ ID NO: 1 - DNA, 82 bp, Artificial sequence
  Synthetic sequence
gttggatagtgtactgcggctccatagactagctcaggaccaggatcttagatagtaatcaacagcccctcctaattccaac

SEQ ID NO: 2 - DNA, 82 bp, Artificial sequence
  Synthetic sequence
gttggaattaggaggggctgttgattactatctaagatcctggtcctgagctagtctatggagccgcagtacactatccaac

SEQ ID NO: 3 - DNA, 25 bp, Artificial sequence
  Synthetic sequence
  misc_feature (24)..(25): n is a, c, g, or t
gaaattaatacgactcactatagnn

SEQ ID NO: 4 - DNA, 23 bp, Artificial sequence
  Synthetic sequence
ctatagtgagtcgtattaatttc

SEQ ID NO: 5 - DNA, 90 bp, Artificial sequence
  Synthetic sequence
taagagctatgctggaaacagcatagcaagtttaaataaggctagtccgttatcaacttgaaaaagtggcaccgagtcggtgcttttttt

SEQ ID NO: 6 - DNA, 93 bp, Artificial sequence
  Synthetic sequence
aaaaaaagcaccgactcggtgccactttttcaagttgataacggactagccttatttaaacttgctatgctgtttccagcatagctcttaaac

SEQ ID NO: 7 - DNA, 128 bp, Artificial sequence
  Synthetic sequence
gttggatagtgtactgcggctccatagactgttaagagctatgctggaaacagcatagcaagtttaaataaggctagtccgttatcaacttgaaaaagtggcaccgagtcggtgccctgcagctgcga

SEQ ID NO: 8 - DNA, 128 bp, Artificial sequence
  Synthetic sequence
tcgcagctgcagggcaccgactcggtgccactttttcaagttgataacggactagccttatttaaacttgctatgctgtttccagcatagctcttaacagtctatggagccgcagtacactatccaac

SEQ ID NO: 9 - DNA, 28 bp, Artificial sequence
  Synthetic sequence
  misc_feature (27)..(28): n is a, c, g, or t
ggtccgactaatacgactcactatagnn

SEQ ID NO: 10 - DNA, 30 bp, Artificial sequence
  Synthetic sequence
ctatagtgagtcgtattagtcggacctgca

SEQ ID NO: 11 - DNA, 23 bp, Artificial sequence
  Synthetic sequence
gttggatagtgtactgcggctcc

SEQ ID NO: 12 - DNA, 18 bp, Artificial sequence
  Synthetic sequence
tcgcagctgcagggcacc

SEQ ID NO: 13 - DNA, 37 bp, Artificial sequence
  Synthetic sequence
catgcctgcaggttccgactaatacgactcactatag

SEQ ID NO: 14 - DNA, 30 bp, Artificial sequence
  Synthetic sequence
gtcgacctgcagggcaccgactcggtgcca

SEQ ID NO: 15 - protein, 1056 aa, Pasteurella multocida
MQTTNLSYILGLDLGIASVGWAVVEINENEDPIGLIDVGVRIFERAEVPKTGESLALSRRLARSTRRLIRRRAHRLLLAKRFLKREGILSTIDLEKGLPNQAWELRVAGLERRLSAIEWGAVLLHLIKHRGYLSKRKNESQTNNKELGALLSGVAQNHQLLQSDDYRTPAELALKKFAKEEGHIRNQRGAYTHTFNRLDLLAELNLLFAQQHQFGNPHCKEHIQQYMTELLMWQKPALSGEAILKMLGKCTHEKNEFKAAKHTYSAERFVWLTKLNNLRILEDGAERALNEEERQLLINHPYEKSKLTYAQVRKLLGLSEQAIFKHLRYSKENAESATFMELKAWHAIRKALENQGLKDTWQDLAKKPDLLDEIGTAFSLYKTDEDIQQYLTNKVPNSVINALLVSLNFDKFIELSLKSLRKILPLMEQGKRYDQACREIYGHHYGEANQKTSQLLPAIPAQEIRNPVVLRTLSQARKVINAIIRQYGSPARVHIETGRELGKSFKERREIQKQQEDNRTKRESAVQKFKELFSDFSSEPKSKDILKFRLYEQQHGKCLYSGKEINIHRLNEKGYVEIDHALPFSRTWDDSFNNKVLVLASENQNKGNQTPYEWLQGKINSERWKNFVALVLGSQCSAAKKQRLLTQVIDDNKFIDRNLNDTRYIARFLSNYIQENLLLVGKNKKNVFTPNGQITALLRSRWGLIKARENNNRHHALDAIVVACATPSMQQKITRFIRFKEVHPYKIENRYEMVDQESGEIISPHFPEPWAYFRQEVNIRVFDNHPDTVLKEMLPDRPQANHQFVQPLFVSRAPTRKMSGQGHMETIKSAKRLAEGISVLRIPLTQLKPNLLENMVNKEREPALYAGLKARLAEFNQDPAKAFATPFYKQGGQQVKAIRVEQVQKSGVLVRENNGVADNASIVRTDVFIKNNKFFLVPIYTWQVAKGILPNKAIVAHKNEDEWEEMDEGAKFKFSLFPNDLVELKTKKEYFFGYYIGLDRATGNISLKEHDGEISKGKDGVYRVGVKLALSFEKYQVDELGKNRQICRPQQRQPVR

SEQ ID NO: 16 - protein, 1368 aa, Streptococcus pyogenes [sequence omitted]

SEQ ID NO: 17 - protein, 1334 aa, Listeria innocua
MKKPYTIGLDIGTNSVGWAVLTDQYDLVKRKMKIAGDSEKKQIKKNFWGVRLFDEGQTAADRRMARTARRRIERRRNRISYLQGIFAEEMSKTDANFFCRLSDSFYVDNEKRNSRHPFFATIEEEVEYHKNYPTIYHLREELVNSSEKADLRLVYLALAHIIKYRGNFLIEGALDTQNTSVDGIYKQFIQTYNQVFASGIEDGSLKKLEDNKDVAKILVEKVTRKEKLERILKLYPGEKSAGMFAQFISLIVGSKGNFQKPFDLIEKSDIECAKDSYEEDLESLLALIGDEYAELFVAAKNAYSAVVLSSIITVAETETNAKLSASMIERFDTHEEDLGELKAFIKLHLPKHYEEIFSNTEKHGYAGYIDGKTKQADFYKYMKMTLENIEGADYFIAKIEKENFLRKQRTFDNGAIPHQLHLEELEAILHQQAKYYPFLKENYDKIKSLVTFRIPYFVGPLANGQSEFAWLTRKADGEIRPWNIEEKVDFGKSAVDFIEKMTNKDTYLPKENVLPKHSLCYQKYLVYNELTKVRYINDQGKTSYFSGQEKEQIFNDLFKQKRKVKKKDLELFLRNMSHVESPTIEGLEDSFNSSYSTYHDLLKVGIKQEILDNPVNTEMLENIVKILTVFEDKRMIKEQLQQFSDVLDGVVLKKLERRHYTGWGRLSAKLLMGIRDKQSHLTILDYLMNDDGLNRNLMQLINDSNLSFKSIIEKEQVTTADKDIQSIVADLAGSPAIKKGILQSLKIVDELVSVMGYPPQTIVVEMARENQTTGKGKNNSRPRYKSLEKAIKEFGSQILKEHPTDNQELRNNRLYLYYLQNGKDMYTGQDLDIHNLSNYDIDHIVPQSFITDNSIDNLVLTSSAGNREKGDDVPPLEIVRKRKVFWEKLYQGNLMSKRKFDYLTKAERGGLTEADKARFIHRQLVETRQITKNVANILHQRFNYEKDDHGNTMKQVRIVTLKSALVSQFRKQFQLYKVRDVNDYHHAHDAYLNGVVANTLLKVYPQLEPEFVYGDYHQFDWFKANKATAKKQFYTNIMLFFAQKDRIIDENGEILWDKKYLDTVKKVMSYRQMNIVKKTEIQKGEFSKATIKPKGNSSKLIPRKTNWDPMKYGGLDSPNMAYAVVIEYAKGKNKLVFEKKIIRVTIMERKAFEKDEKAFLEEQGYRQPKVLAKLPKYTLYECEEGRRRMLASANEAQKGNQQVLPNHLVTLLHHAANCEVSDGKSLDYIESNREMFAELLAHVSEFAKRYTLAEANLNKINQLFEQNKEGDIKAIAQSFVDLMAFNAMGAPASFKFFETTIERKRYNNLKELLNSTIIYQSITGLYESRKRLDD

SEQ ID NO: 18 - protein, 1368 aa, Streptococcus pyogenes
MDKKYSIGLDIGTNSVGWAVITDDYKVPSKKLKGLGNTDRHGIKKNLIGALLFDSGETAEATRLKRTARRRYTRRKNRICYLQEIFSNEMAKVDDSFFHRLEESFLVEEDKKHERHPIFGNIVDEVAYHEKYPTIYHLRKKLADSTDKVDLRLIYLALAHMIKFRGHFLIEGDLNPDNSDVDKLFIQLVQTYNQLFEENPINASRVDAKAILSARLSKSRRLENLIAQLPGEKKNGLFGNLIALSLGLTPNFKSNFDLAEDAKLQLSKDTYDDDLDNLLAQIGDQYADLFLAAKNLSDATLLSDILRVNSEITKAPLSASMIKRYDEHHQDLTLLKALVRQQLPEKYKEIFFDQSKNGYAGYIDGGASQEEFYKFIKPILEKMDGTEELLAKLNREDLLRKQRTFDNGSIPYQIHLGELHAILRRQEDFYPFLKDNREKIEKILTFRIPYYVGPLARGNSRFAWMTRKSEETITPWNFEEVVDKGASAQSFIERMTNFDKNLPNEKVLPKHSLLYEYFTVYNELTKVKYVTEGMRKPAFLSGEQKKAIVDLLFKTNRKVTVKQLKEDYFKKIECFDSVEISGVEDRFNASLGTYHDLLKIIKDKDFLDNEENEDILEDIVLTLTLFEDREMIEERLKTYAHLFDDKVMKQLKRRRYTGWGRLSRKLINGIRDKQSGKTILDFLKSDGFANRNFMQLIHDDSLTFKEDIQKAQVSGQGDSLHEHIANLAGSPAIKKGILQTVKVVDELVKVMGRHKPENIVIEMARENQTTQKGQKNSRERMKRIEEGIKELGSDILKEYPVENTQLQNEKLYLYYLQNGRDMYVDQELDINRLSDYDVDHIVPQSFLKDDSIDNKVLTRSDKNRGKSDNVPSEEVVKKMKNYWRQLLNAKLITQRKFDNLTKAERGGLSELDKVGFIKRQLVETRQITKHVAQILDSRMNTKYDENDKLIREVRVITLKSKLVSDFRKDFQFYKVREINNYHHAHDAYLNAVVGTALIKKYPKLESEFVYGDYKVYDVRKMIAKSEQEIGKATAKYFFYSNIMNFFKTEITLANGEIRKRPLIETNGETGEIVWDKGRDFATVRKVLSMPQVNIVKKTEVQTGGFSKESILPKRNSDKLIARKKDWDPKKYGGFDSPTVAYSVLVVAKVEKGKSKKLKSVKELLGITIMERSSFEKDPIDFLEAKGYKEVRKDLIIKLPKYSLFELENGRKRMLASAGELQKGNELALPSKYVNFLYLASHYEKLKGSPEDNEQKQLFVEQHKHYLDEIIEQISEFSKRVILADANLDKVLSAYNKHRDKPIREQAENIIHLFTLTNLGAPAAFKYFDTTIDRKRYTSTKEVLDATLIHQSITGLYETRIDLSQLGGD

SEQ ID NO: 19 - protein, 1370 aa, Streptococcus agalactiae
MNKPYSIGLDIGTNSVGWSIITDDYKVPAKKMRVLGNTDKEYIKKNLIGALLFDGGNTAADRRLKRTARRRYTRRRNRILYLQEIFAEEMSKVDDSFFHRLEDSFLVEEDKRGSKYPIFATLQEEKDYHEKFSTIYHLRKELADKKEKADLRLIYIALAHIIKFRGHFLIEDDSFDVRNTDISKQYQDFLEIFNTTFENNDLLSQNVDVEAILTDKISKSAKKDRILAQYPNQKSTGIFAEFLKLIVGNQADFKKYFNLEDKTPLQFAKDSYDEDLENLLGQIGDEFADLFSAAKKLYDSVLLSGILTVIDLSTKAPLSASMIQRYDEHREDLKQLKQFVKASLPEKYQEIFADSSKDGYAGYIEGKTNQEAFYKYLSKLLTKQEDSENFLEKIKNEDFLRKQRTFDNGSIPHQVHLTELKAIIRRQSEYYPFLKENQDRIEKILTFRIPYYIGPLAREKSDFAWMTRKTDDSIRPWNFEDLVDKEKSAEAFIHRMTNNDFYLPEEKVLPKHSLIYEKFTVYNELTKVRYKNEQGETYFFDSNIKQEIFDGVFKEHRKVSKKKLLDFLAKEYEEFRIVDVIGLDKENKAFNASLGTYHDLEKILDKDFLDNPDNESILEDIVQTLTLFEDREMIKKRLENYKDLFTESQLKKLYRRHYTGWGRLSAKLINGIRDKESQKTILDYLIDDGRSNRNFMQLINDDGLSFKSIISKAQAGSHSDNLKEVVGELAGSPAIKKGILQSLKIVDELVKVMGYEPEQIVVEMARENQTTNQGRRNSRQRYKLLDDGVKNLASDLNGNILKEYPTDNQALQNERLFLYYLQNGRDMYTGEALDIDNLSQYDIDHIIPQAFIKDDSIDNRVLVSSAKNRGKSDDVPSLEIVKDCKVFWKKLLDAKLMSQRKYDNLTKAERGGLTSDDKARFIQRQLVETRQITKHVARILDERFNNELDSKGRRIRKVKIVTLKSNLVSNFRKEFGFYKIREVNNYHHAHDAYLNAVVAKAILTKYPQLEPEFVYGDYPKYNSYKTRKSATEKLFFYSNIMNFFKTKVTLADGTVVVKDDIEVNNDTGEIVWDKKKHFATVRKVLSYPQNNIVKKTEIQTGGFSKESILAHGNSDKLIPRKTKDIYLDPKKYGGFDSPIVAYSVLVVADIKKGKAQKLKTVTELLGITIMERSRFEKNPSAFLESKGYLNIRADKLIILPKYSLFELENGRRRLLASAGELQKGNELALPTQFMKFLYLASRYNESKGKPEEIEKKQEFVNQHVSYFDDILQLINDFSKRVILADANLEKINKLYQDNKENISVDELANNIINLFTFTSLGAPAAFKFFDKIVDRKRYTSTKEVLNSTLIHQSITGLYETRIDLGKLGED

SEQ ID NO: 20 - protein, 1345 aa, Streptococcus mutans
MKKPYSIGLDIGTNSVGWAVVTDDYKVPAKKMKVLGNTDKSHIEKNLLGALLFDSGNTAEDRRLKRTARRRYTRRRNRILYLQEIFSEEMGKVDDSFFHRLEDSFLVTEDKRGERHPIFGNLEEEVKYHENFPTIYHLRQYLADNPEKVDLRLVYLALAHIIKFRGHFLIEGKFDTRNNDVQRLFQEFLAVYDNTFENSSLQEQNVQVEEILTDKISKSAKKDRVLKLFPNEKSNGRFAEFLKLIVGNQADFKKHFELEEKAPLQFSKDTYEEELEVLLAQIGDNYAELFLSAKKLYDSILLSGILTVTDVGTKAPLSASMIQRYNEHQMDLAQLKQFIRQKLSDKYNEVFSDVSKDGYAGYIDGKTNQEAFYKYLKGLLNKIEGSGYFLDKIEREDFLRKQRTFDNGSIPHQIHLQEMRAIIRRQAEFYPFLADNQDRIEKLLTFRIPYYVGPLARGKSDFAWLSRKSADKITPWNFDEIVDKESSAEAFINRMTNYDLYLPNQKVLPKHSLLYEKFTVYNELTKVKYKTEQGKTAFFDANMKQEIFDGVFKVYRKVTKDKLMDFLEKEFDEFRIVDLTGLDKENKVFNASYGTYHDLCKILDKDFLDNSKNEKILEDIVLTLTLFEDREMIRKRLENYSDLLTKEQVKKLERRHYTGWGRLSAELIHGIRNKESRKTILDYLIDDGNSNRNFMQLINDDALSFKEEIAKAQVIGETDNLNQVVSDIAGSPAIKKGILQSLKIVDELVKIMGHQPENIVVEMARENQFTNQGRRNSQQRLKGLTDSIKEFGSQILKEHPVENSQLQNDRLFLYYLQNGRDMYTGEELDIDYLSQYDIDHIIPQAFIKDNSIDNRVLTSSKENRGKSDDVPSKDVVRKMKSYWSKLLSAKLITQRKFDNLTKAERGGLTDDDKAGFIKRQLVETRQITKHVARILDERFNTETDENNKKIRQVKIVTLKSNLVSNFRKEFELYKVREINDYHHAHDAYLNAVIGKALLGVYPQLEPEFVYGDYPHFHGHKENKATAKKFFYSNIMNFFKKDDVRTDKNGEIIWKKDEHISNIKKVLSYPQVNIVKKVEEQTGGFSKESILPKGNSDKLIPRKTKKFYWDTKKYGGFDSPIVAYSILVIADIEKGKSKKLKTVKALVGVTIMEKMTFERDPVAFLERKGYRNVQEENIIKLPKYSLFKLENGRKRLLASARELQKGNEIVLPNHLGTLLYHAKNIHKVDEPKHLDYVDKHKDEFKELLDVVSNFSKKYTLAEGNLEKIKELYAQNNGEDLKELASSFINLLTFTAIGAPATFKFFDKNIDRKRYTSTTEILNATLIHQSITGLYETRIDLNKLGGD

SEQ ID NO: 21 - protein, 1377 aa, Streptococcus agalactiae
MNKPYSIGLDIGTNSVGWSIITDDYKVPAKKMRVLGNTDKEYIKKNLIGALLFDGGNTAADRRLKRTARRRYTRRRNRILYLQEIFAEEMSKVDDSFFHRLEDSFLVEEDKRGSKYPIFATMQEEKYYHEKFPTIYHLRKELADKKEKADLRLVYLALAHIIKFRGHFLIEDDRFDVRNTDIQKQYQAFLEIFDTTFENNHLLSQNVDVEAILTDKISKSAKKDRILAQYPNQKSTGIFAEFLKLIVGNQADFKKHFNLEDKTPLQFAKDSYDEDLENLLGQIGDEFADLFSVAKKLYDSVLLSGILTVTDLSTKAPLSASMIQRYDEHHEDLKHLKQFVKASLPENYREVFADSSKDGYAGYIEGKTNQEAFYKYLLKLLTKQEGSEYFLEKIKNEDFLRKQRTFDNGSIPHQVHLTELRAIIRRQSEYYPFLKENQDRIEKILTFRIPYYVGPLAREKSDFAWMTRKTDDSIRPWNFEDLVDKEKSAEAFIHRMTNNDLYLPEEKVLPKHSLIYEKFTVYNELTKVRFLAEGFKDFQFLNRKQKETIFNSLFKEKRKVTEKDIISFLNKVDGYEGIAIKGIEKQFNASLSTYHDLKKILGKDFLDNTDNELILEDIVQTLTLFEDREMIKKCLDIYKDFFTESQLKKLYRRHYTGWGRLSAKLINGIRNKENQKTILDYLIDDGSANRNFMQLINDDDLSFKPIIDKARTGSHSDNLKEVVGELAGSPAIKKGILQSLKIVDELVKVMGYEPEQIVVEMARENQTTAKGLSRSRQRLTTLRESLANLKSNILEEKKPKYVKDQVENHHLSDDRLFLYYLQNGRDMYTKKALDIDNLSQYDIDHIIPQAFIKDDSIDNRVLVSSAKNRGKSDDVPSIEIVKARKMFWKNLLDAKLMSQRKYDNLTKAERGGLTSDDKARFIQRQLVETRQITKHVARILDERFNNEVDNGKKICKVKIVTLKSNLVSNFRKEFGFYKIREVNDYHHAHDAYLNAVVAKAILTKYPQLEPEFVYGMYRQKKLSKIVHEDKEEKYSEATRKMFFYSNLMNMFKRVVRLADGSIVVRPVIETGRYMRKTAWDKKKHFATVRKVLSYPQNNIVKKTEIQTGGFSKESILAHGNSDKLIPRKTKDIYLDPKKYGGFDSPIVAYSVLVVADIKKGKAQKLKTVTELLGITIMERSRFEKNPSAFLESKGYLNIRDDKLMILPKYSLFELENGRRRLLASAGELQKGNELALPTQFMKFLYLASRYNESKGKPEEIEKKQEFVNQHVSYFDDILQLINDFSKRVILADANLEKINKLYQDNKENIPVDELANNIINLFTFTSLGAPAAFKFFDKIVDRKRYTSTKEVLNSTLIHQSITGLYETRIDLGKLGED

SEQ ID NO: 22 - protein, 1368 aa, Streptococcus pyogenes; identical to SEQ ID NO: 18

SEQ ID NO: 23 - protein, 131 aa, Helicobacter hepaticus
MRILGFDIGITSIGWAYVESNELKDCGVRIFTKAENPKNGDSLAAPRREARGARRRLARRKARLNAIKRLLCKEFELNLNDYLANDGELPKAYQTSKDTKSPYELYTAFHWIIFAFCSIASSLSNRQMLPI

SEQ ID NO: 24 - protein, 1059 aa, Wolinella succinogenes
MIERILGVDLGISSLGWAIVEYDKDDEAANRIIDCGVRLFTAAETPKKKESPNKARREARGIRRVLNRRRVRMNMIKKLFLRAGLIQDVDLDGEGGMFYSKANRADVWELRHDGLYRLLKGDELARVLIHIAKHRGYKFIGDDEADEESGKVKKAGVVLRQNFEAAGCRTVGEWLWRERGANGKKRNKHGDYEISIHRDLLVEEVEAIFVAQQEMRSTIATDALKAAYREIAFFVRPMQRIEKMVGHCTYFPEERRAPKSAPTAEKFIAISKFFSTVIIDNEGWEQKIIERKTLEELLDFAVSREKVEFRHLRKFLDLSDNEIFKGLHYKGKPKTAKKREATLFDPNEPTELEFDKVEAEKKAWISLRGAAKLREALGNEFYGRFVALGKHADEATKILTYYKDEGQKRRELTKLPLEAEMVERLVKIGFSDFLKLSLKAIRDILPAMESGARYDEAVLMLGVPHKEKSAILPPLNKTDIDILNPTVIRAFAQFRKVANALVRKYGAFDRVHFELAREINTKGEIEDIKESQRKNEKERKEAADWIAETSFQVPLTRKNILKKRLYIQQDGRCAYTGDVIELERLFDEGYCEIDHILPRSRSADDSFANKVLCLARANQQKTDRTPYEWFGHDAARWNAFETRTSAPSNRVRTGKGKIDRLLKKNFDENSEMAFKDRNLNDTRYMARAIKTYCEQYWVFKNSHTKAPVQVRSGKLTSVLRYQWGLESKDRESHTHHAVDAIIIAFSTQGMVQKLSEYYRFKETHREKERPKLAVPLANFRDAVEEATRIENTETVKEGVEVKRLLISRPPRARVTGQAHEQTAKPYPRIKQVKNKKKWRLAPIDEEKFESFKADRVASANQKNFYETSTIPRVDVYHKKGKFHLVPIYLHEMVLNELPNLSLGTNPEAMDENFFKFSIFKDDLISIQTQGTPKKPAKIIMGYFKNMHGANMVLSSINNSPCEGFTCTPVSMDKKHKDKCKLCPEENRIAGRCLQGFLDYWSQEGLRPPRKEFECDQGVKFALDVKKYQIDPLGYYYEVKQEKRLGTIPQMRSAKKLVKK

SEQ ID NO: 25 - protein, 1409 aa, Wolinella succinogenes
MLVSPISVDLGGKNTGFFSFTDSLDNSQSGTVIYDESFVLSQVGRRSKRHSKRNNLRNKLVKRLFLLILQEHHGLSIDVLPDEIRGLFNKRGYTYAGFELDEKKKDALESDTLKEFLSEKLQSIDRDSDVEDFLNQIASNAESFKDYKKGFEAVFASATHSPNKKLELKDELKSEYGENAKELLAGLRVTKEILDEFDKQENQGNLPRAKYFEELGEYIATNEKVKSFFDSNSLKLTDMTKLIGNISNYQLKELRRYFNDKEMEKGDIWIPNKLHKITERFVRSWHPKNDADRQRRAELMKDLKSKEIMELLTTTEPVMTIPPYDDMNNRGAVKCQTLRLNEEYLDKHLPNWRDIAKRLNHGKFNDDLADSTVKGYSEDSTLLHRLLDTSKEIDIYELRGKKPNELLVKTLGQSDANRLYGFAQNYYELIRQKVRAGIWVPVKNKDDSLNLEDNSNMLKRCNHNPPHKKNQIHNLVAGILGVKLDEAKFAEFEKELWSAKVGNKKLSAYCKNIEELRKTHGNTFKIDIEELRKKDPAELSKEEKAKLRLTDDVILNEWSQKIANFFDIDDKHRQRFNNLFSMAQLHTVIDTPRSGFSSTCKRCTAENRFRSETAFYNDETGEFHKKATATCQRLPADTQRPFSGKIERYIDKLGYELAKIKAKELEGMEAKEIKVPIILEQNAFEYEESLRKSKTGSNDRVINSKKDRDGKKLAKAKENAEDRLKDKDKRIKAFSSGICPYCGDTIGDDGEIDHILPRSHTLKIYGTVFNPEGNLIYVHQKCNQAKADSIYKLSDIKAGVSAQWIEEQVANIKGYKTFSVLSAEQQKAFRYALFLQNDNEAYKKVVDWLRTDQSARVNGTQKYLAKKIQEKLTKMLPNKHLSFEFILADATEVSELRRQYARQNPLLAKAEKQAPSSHAIDAVMAFVARYQKVFKDGTPPNADEVAKLAMLDSWNPASNEPLTKGLSTNQKIEKMIKSGDYGQKNMREVFGKSIFGENAIGERYKPIVVQEGGYYIGYPATVKKGYELKNCKVVTSKNDIAKLEKIIKNQDLISLKENQYIKIFSINKQTISELSNRYFNMNYKNLVERDKEIVGLLEFIVENCRYYTKKVDVKFAPKYIHETKYPFYDDWRRFDEAWRYLQENQNKTSSKDRFVIDKSSLNEYYQPDKNEYKLDVDTQPIWDDFCRWYFLDRYKTANDKKSIRIKARKTFSLLAESGVQGKVFRAKRKIPTGYAYQALPMDNNVIAGDYANILLEANSKTLSLVPKSGISIEKQLDKKLDVIKKTDVRGLAIDNNSFFNADFDTHGIRLIVENTSVKVGNFPISAIDKSAKRMIFRALFEKEKGKRKKKTTISFKESGPVQDYLKVFLKKIVKIQLRTDGSISNIVVRKNAADFTLSFRSEHIQKLLK

SEQ ID NO: 26 - protein, 1374 aa, Fusobacterium nucleatum
MKKQKFSDYYLGFDIGTNSVGWCVTDLDYNVLRFNKKDMWGSRLFDEAKTAAERRVQRNSRRRLKRRKWRLNLLEEIFSDEIMKIDSNFFRRLKESSLWLEDKNSKEKFTLFNDDNYKDYDFYKQYPTIFHLRDELIKNPEKKDIRLIYLALHSIFKSRGHFLFEGQNLKEIKNFETLYNNLISFLEDNGINKSIDKDNIEKLEKIICDSGKGLKDKEKEFKGIFNSDKQLVAIFKLSVGSSVSLNDLFDTDEYKKEEVEKEKISFREQIYEDDKPIYYSILGEKIELLDIAKSFYDFMVLNNILSDSNYISEAKVKLYEEHKKDLKNLKYIIRKYNKENYDKLFKDKNENNYPAYIGLNKEKDKKEVVEKSRLKIDDLIKVIKGYLPKPERIEEKDKTIFNEILNKIELKTILPKQRISDNGTLPYQIHEVELEKILENQSKYYDFLNYEENGVSTKDKLLKTFKFRIPYYVGPLNSYHKDKGGNSWIVRKEEGKILPWNFEQKVDIEKSAEEFIKRMTNKCTYLNGEDVIPKDSFLYSEYIILNELNKVQVNDEFLNEENKRKIIDELFKENKKVSEKKFKEYLLVNQIANRTVELKGIKDSFNSNYVSYIKFKDIFGEKLNLDIYKEISEKSILWKCLYGDDKKIFEKKIKNEYGDILNKDEIKKINSFKFNTWGRLSEKLLTGIEFINLETGECYSSVMEALRRTNYNLMELLSSKFTLQESIDNENKEMNEVSYRDLIEESYVSPSLKRAILQTLKIYEEIKKITGRVPKKVFIEMARGGDESMKNKKIPARQEQLKKLYDSCGNDIANFSIDIKEMKNSLSSYDNNSLRQKKLYLYYLQFGKCMYTGREIDLDRLLQNNDTYDIDHIYPRSKVIKDDSFDNLVLVLKNENAEKSNEYPVKKEIQEKMKSFWRFLKEKNFISDEKYKRLTGKDDFELRGFMARQLVNVRQTTKEVGKILQQIEPEIKIVYSKAEIASSFREMFDFIKVRELNDTHHAKDAYLNIVAGNVYNTKFTEKPYRYLQEIKENYDVKKIYNYDIKNAWDKENSLEIVKKNMEKNTVNITRFIKEEKGELFNLNPIKKGETSNEIISIKPKLYDGKDNKLNEKYGYYTSLKAAYFIYVEHEKKNKKVKTFERITRIDSTLIKNEKNLIKYLVSQKKLLNPKIIKKIYKEQTLIIDSYPYTFTGVDSNKKVELKNKKQLYLEKKYEQILKNALKFVEDNQGETEENYKFIYLKKRNNNEKNETIDAVKERYNIEFNEMYDKFLEKLSSKDYKNYINNKLYTNFLNSKEKFKKLKLWEKSLILREFLKIFNKNTYGKYEIKDSQTKEKLFSFPEDTGRIRLGQSSLGNNKELLEESVTGLFVKKIKL

SEQ ID NO: 27 - protein, 1084 aa, Corynebacterium diphtheriae
MKYHVGIDVGTFSVGLAAIEVDDAGMPIKTLSLVSHIHDSGLDPDEIKSAVTRLASSGIARRTRRLYRRKRRRLQQLDKFIQRQGWPVIELEDYSDPLYPWKVRAELAASYIADEKERGEKLSVALRHIARHRGWRNPYAKVSSLYLPDGPSDAFKAIREEIKRASGQPVPETATVGQMVTLCELGTLKLRGEGGVLSARLQQSDYAREIQEICRMQEIGQELYRKIIDVVFAAESPKGSASSRVGKDPLQPGKNRALKASDAFQRYRIAALIGNLRVRVDGEKRILSVEEKNLVFDHLVNLTPKKEPEWVTIAEILGIDRGQLIGTATMTDDGERAGARPPTHDTNRSIVNSRIAPLVDWWKTASALEQHAMVKALSNAEVDDFDSPEGAKVQAFFADLDDDVHAKLDSLHLPVGRAAYSEDTLVRLTRRMLSDGVDLYTARLQEFGIEPSWTPPTPRIGEPVGNPAVDRVLKTVSRWLESATKTWGAPERVIIEHVREGFVTEKRAREMDGDMRRRAARNAKLFQEMQEKLNVQGKPSRADLWRYQSVQRQNCQCAYCGSPITFSNSEMDHIVPRAGQGSTNTRENLVAVCHRCNQSKGNTPFAIWAKNTSIEGVSVKEAVERTRHWVTDTGMRSTDFKKFTKAVVERFQRATMDEEIDARSMESVAWMANELRSRVAQHFASHGTTVRVYRGSLTAEARRASGISGKLKFFDGVGKSRLDRRHHAIDAAVIAFTSDYVAETLAVRSNLKQSQAHRQEAPQWREFTGKDAEHRAAWRVWCQKMEKLSALLTEDLRDDRVVVMSNVRLRLGNGSAHKETIGKLSKVKLSSQLSVSDIDKASSEALWCALTREPGFDPKEGLPANPERHIRVNGTHVYAGDNIGLFPVSAGSIALRGGYAELGSSFHHARVYKITSGKKPAFAMLRVYTIDLLPYRNQDLFSVELKPQTMSMRQAEKKLRDALATGNAEYLGWLVVDDELVVDTSKIATDQVKAVEAELGTIRRWRVDGFFSPSKLRLRPLQMSKEGIKKESAPELSKIIDRPGWLPAVNKLFSDGNVTVVRRDSLGRVRLESTAHLPVTWKVQ

SEQ ID NO: 28 - protein, 1395 aa, Treponema denticola
MKKEIKDYFLGLDVGTGSVGWAVTDTDYKLLKANRKDLWGMRCFETAETAEVRRLHRGARRRIERRKKRIKLLQELFSQEIAKTDEGFFQRMKESPFYAEDKTILQENTLFNDKDFADKTYHKAYPTINHLIKAWIENKVKPDPRLLYLACHNIIKKRGHFLFEGDFDSENQFDTSIQALFEYLREDMEVDIDADSQKVKEILKDSSLKNSEKQSRLNKILGLKPSDKQKKAITNLISGNKINFADLYDNPDLKDAEKNSISFSKDDFDALSDDLASILGDSFELLLKAKAVYNCSVLSKVIGDEQYLSFAKVKIYEKHKTDLTKLKNVIKKHFPKDYKKVFGYNKNEKNNNNYSGYVGVCKTKSKKLIINNSVNQEDFYKFLKTILSAKSEIKEVNDILTEIETGTFLPKQISKSNAEIPYQLRKMELEKILSNAEKHFSFLKQKDEKGLSHSEKIIMLLTFKIPYYIGPINDNHKKFFPDRCWVVKKEKSPSGKTTPWNFFDHIDKEKTAEAFITSRTNFCTYLVGESVLPKSSLLYSEYTVLNEINNLQIIIDGKNICDIKLKQKIYEDLFKKYKKITQKQISTFIKHEGICNKTDEVIILGIDKECTSSLKSYIELKNIFGKQVDEISTKNMLEEIIRWATIYDEGEGKTILKTKIKAEYGKYCSDEQIKKILNLKFSGWGRLSRKFLETVTSEMPGFSEPVNIITAMRETQNNLMELLSSEFTFTENIKKINSGFEDAEKQFSYDGLVKPLFLSPSVKKMLWQTLKLVKEISHITQAPPKKIFIEMAKGAELEPARTKTRLKILQDLYNNCKNDADAFSSEIKDLSGKIENEDNLRLRSDKLYLYYTQLGKCMYCGKPIEIGHVFDTSNYDIDHIYPQSKIKDDSISNRVLVCSSCNKNKEDKYPLKSEIQSKQRGFWNFLQRNNFISLEKLNRLTRATPISDDETAKFIARQLVETRQATKVAAKVLEKMFPETKIVYSKAETVSMFRNKFDIVKCREINDFHHAHDAYLNIVVGNVYNTKFTNNPWNFIKEKRDNPKIADTYNYYKVFDYDVKRNNITAWEKGKTIITVKDMLKRNTPIYTRQAACKKGELFNQTIMKKGLGQHPLKKEGPFSNISKYGGYNKVSAAYYTLIEYEEKGNKIRSLETIPLYLVKDIQKDQDVLKSYLTDLLGKKEFKILVPKIKINSLLKINGFPCHITGKTNDSFLLRPAVQFCCSNNEVLYFKKIIRFSEIRSQREKIGKTISPYEDLSFRSYIKENLWKKTKNDEIGEKEFYDLLQKKNLEIYDMLLTKHKDTIYKKRPNSATIDILVKGKEKFKSLIIENQFEVILEILKLFSATRNVSDLQHIGGSKYSGVAKIGNKISSLDNCILIYQSITGIFEKRIDLLKV

SEQ ID NO: 29 - protein, 1334 aa, Listeria monocytogenes
MKNPYTIGLDIGTNSVGWAVLTNQYDLVKRKMKVAGNSDKKQIKKNFWGVRLFDDGQTAVDRRMNRTARRRIERRRNRISYLQEIFAVEMANIDANFFCRLNDSFYVDSEKRNSRHPFFATIEEEVAYHDNYRTIYHLREKLVNSSEKADLRLVYLALAHIIKYRGNFLIEGALDTKNTSVDEVYKQFIETYNQVFMSNIEEGALAKVEENIEVANILAGKFTRREKFERILQLYPGEKSTGMFAQFISLIVGSKGNFQKVFDLIEKTDIECAKDSYEEDLETLLAIIGDEYAELFVAAKNTYNAVVLSSIITVTDTETNAKLSASMIERFDAHEKDLVELKAFIKLNLPKQYEEIFSNAAIDGYAGYIDGKTKQVDFYKYLKTILENIEGSDYFIAKIEEENFLRKQRTFDNGAIPHQLHLEELEAIIHQQAKYYPFLKEDYDKIKSLVTFRIPYFVGPLANGQSEFAWLTRKADGEIRPWNIEEKVDFGKSAVDFIEKMTNKDTYLPKENVLPKHSLCYQKYMVYNELTKIRYIDDQGKTNYFSGREKQQVFNDLFKQKRKVKKKDLELFLRNINHIESPTIEGLEDSFNASYATYHDLLKVGMKQEILDNPLNTEMLEDIVKILTVFEDKPMIKEQLQQFSDVLDGGVLKKLERRHYTGWGRLSAKLLVGIREKQSHLTILDYLMNDDGLNRNLMQLINDSNLSFKSIIEKEQVSTTDKDLQSIVAELAGSPAIKKGILQSLKIVDELVSIMGYPPQTIVVEMARENQTTGKGKNNSKPRYKSLEKAIKEFGSQILKEHPTDNQELKNNRLYLYYLQNGKDMYTGQELDIHNLSNYDIDHIVPQSFITDNSIDNLVLTSSAGNREKGGDVPPLEIVRKRKVFWEKLYQGNLMSKRKFDYLTKAERGGLTEADKARFIHRQLVETRQITKNVANILYQRFNKETDNHGNTMEQVRIVTLKSALVSQFRKQFQLYKVREVNGYHHAHDAYLNGVVANTLLKVYPQLEPEFVYGEYHQFDWFKANKATAKKQFYTNIMLFFAQKERIIDENGEILWDKKYLETIKKVLDYRQMNIVKKTEIQKGEFSKATIKPKGNSSKLIPRKENWDPMKYGGLDSPNMAYAVIIEHAKGKKKIVIEKKLIQINIMERKMFEKDEEAFLEEKGYRHPKVLTKLPKYTLYECEKGRRRMLASANEAQKGNQLVLSNHLVSLLYHAKNCEASDGKSLKYIEAHRETFSELLAQVSEFATRYTLADANLSKINNLFEQNKEGDIKAIAQSFVDLMAFNAMGAPASFKFFEATIDRKRYTNLKELLSSTIIYQSITGLYESRKRLDD

SEQ ID NO: 30 - protein, 1236 aa, Mycoplasma mobile
MYFYKNKENKLNKKVVLGLDLGIASVGWCLTDISQKEDNKFPIILHGVRLFETVDDSDDKLLNETRRKKRGQRRRNRRLFTRKRDFIKYLIDNNIIELEFDKNPKILVRNFIEKYINPFSKNLELKYKSVTNLPIGFHNLRKAAINEKYKLDKSELIVLLYFYLSLRGAFFDNPEDTKSKEMNKNEIEIFDKNESIKNAEFPIDKIIEFYKISGKIRSTINLKFGHQDYLKEIKQVFEKQNIDFMNYEKFAMEEKSFFSRIRNYSEGPGNEKSFSKYGLYANENGNPELIINEKGQKIYTKIFKTLWESKIGKCSYDKKLYRAPKNSFSAKVFDITNKLTDWKHKNEYISERLKRKILLSRFLNKDSKSAVEKILKEENIKFENLSEIAYNKDDNKINLPIINAYHSLTTIFKKHLINFENYLISNENDLSKLMSFYKQQSEKLFVPNEKGSYEINQNNNVLHIFDAISNILNKFSTIQDRIRILEGYFEFSNLKKDVKSSEIYSEIAKLREFSGTSSLSFGAYYKFIPNLISEGSKNYSTISYEEKALQNQKNNFSHSNLFEKTWVEDLIASPTVKRSLRQTMNLLKEIFKYSEKNNLEIEKIVVEVTRSSNNKHERKKIEGINKYRKEKYEELKKVYDLPNENTTLLKKLWLLRQQQGYDAYSLRKIEANDVINKPWNYDIDHIVPRSISFDDSFSNLVIVNKLDNAKKSNDLSAKQFIEKIYGIEKLKEAKENWGNWYLRNANGKAFNDKGKFIKLYTIDNLDEFDNSDFINRNLSDTSYITNALVNHLTFSNSKYKYSVVSVNGKQTSNLRNQIAFVGIKNNKETEREWKRPEGFKSINSNDFLIREEGKNDVKDDVLIKDRSFNGHHAEDAYFITIISQYFRSFKRIERLNVNYRKETRELDDLEKNNIKFKEKASFDNFLLINALDELNEKLNQMRFSRMVITKKNTQLFNETLYSGKYDKGKNTIKKVEKLNLLDNRTDKIKKIEEFFDEDKLKENELTKLHIFNHDKNLYETLKIIWNEVKIEIKNKNLNEKNYFKYFVNKKLQEGKISFNEWVPILDNDFKIIRKIRYIKFSSEEKETDEIIFSQSNFLKIDQRQNFSFHNTLYWVQIWVYKNQKDQYCFISIDARNSKFEKDEIKINYEKLKTQKEKLQIINEEPILKINKGDLFENEEKELFYIVGRDEKPQKLEIKYILGKKIKDQKQIQKPVKKYFPNWKKVNLTYMGEIFKK

SEQ ID NO: 31 - protein, 1372 aa, Legionella pneumophila
MESSQILSPIGIDLGGKFTGVCLSHLEAFAELPNHANTKYSVILIDHNNFQLSQAQRRATRHRVRNKKRNQFVKRVALQLFQHILSRDLNAKEETALCHYLNNRGYTYVDTDLDEYIKDETTINLLKELLPSESEHNFIDWFLQKMQSSEFRKILVSKVEEKKDDKELKNAVKNIKNFITGFEKNSVEGHRHRKVYFENIKSDITKDNQLDSIKKKIPSVCLSNLLGHLSNLQWKNLHRYLAKNPKQFDEQTFGNEFLRMLKNFRHLKGSQESLAVRNLIQQLEQSQDYISILEKTPPEITIPPYEARTNTGMEKDQSLLLNPEKLNNLYPNWRNLIPGIIDAHPFLEKDLEHTKLRDRKRIISPSKQDEKRDSYILQRYLDLNKKIDKFKIKKQLSFLGQGKQLPANLIETQKEMETHFNSSLVSVLIQIASAYNKEREDAAQGIWFDNAFSLCELSNINPPRKQKILPLLVGAILSEDFINNKDKWAKFKIFWNTHKIGRTSLKSKCKEIEEARKNSGNAFKIDYEEALNHPEHSNNKALIKIIQTIPDIIQAIQSHLGHNDSQALIYHNPFSLSQLYTILETKRDGFHKNCVAVTCENYWRSQKTEIDPEISYASRLPADSVRPFDGVLARMMQRLAYEIAMAKWEQIKHIPDNSSLLIPIYLEQNRFEFEESFKKIKGSSSDKTLEQAIEKQNIQWEEKFQRIINASMNICPYKGASIGGQGEIDHIYPRSLSKKHFGVIFNSEVNLIYCSSQGNREKKEEHYLLEHLSPLYLKHQFGTDNVSDIKNFISQNVANIKKYISFHLLTPEQQKAARHALFLDYDDEAFKTITKFLMSQQKARVNGTQKFLGKQIMEFLSTLADSKQLQLEFSIKQITAEEVHDHRELLSKQEPKLVKSRQQSFPSHAIDATLTMSIGLKEFPQFSQELDNSWFINHLMPDEVHLNPVRSKEKYNKPNISSTPLFKDSLYAERFIPVWVKGETFAIGFSEKDLFEIKPSNKEKLFTLLKTYSTKNPGESLQELQAKSKAKWLYFPINKTLALEFLHHYFHKEIVTPDDTTVCHFINSLRYYTKKESITVKILKEPMPVLSVKFESSKKNVLGSFKHTIALPATKDWERLFNHPNFLALKANPAPNPKEFNEFIRKYFLSDNNPNSDIPNNGHNIKPQKHKAVRKVFSLPVIPGNAGTMMRIRRKDNKGQPLYQLQTIDDTPSMGIQINEDRLVKQEVLMDAYKTRNLSTIDGINNSEGQAYATFDNWLTLPVSTFKPEIIKLEMKPHSKTRRYIRITQSLADFIKTIDEALMIKPSDSIDDPLNMPNEIVCKNKLFGNELKPRDGKMKIVSTGKIVTYEFESDSTPQWIQTLYVTQLKKQP

SEQ ID NO: 32 - protein, 1122 aa, Streptococcus thermophilus
MSDLVLGLDIGIGSVGVGILNKVTGEIIHKNSRIFPAAQAENNLVRRTNRQGRRLTRRKKHRIVRLNRLFEESGLITDFTKISINLNPYQLRVKGLTDELSNEELFIALKNMVKHRGISYLDDASDDGNSSVGDYAQIVKENSKQLETKTPGQIQLERYQTYGQLRGDFTVEKDGKKHRLINVFPTSAYRSEALRILQTQQEFNSQITDEFINRYLEILTGKRKYYHGPGNEKSRTDYGRYRTNGETLDNIFGILIGKCTFYPDEFRAAKASYTAQEFNLLNDLNNLTVPTETKKLSKEQKNQIINYVKNEKVMGPAKLFKYIAKLLSCDVADIKGHRIDKSGKAEIHTFEAYRKMKTLETLDIEQMDRETLDKLAYVLTLNTEREGIQEALEHEFADGSFSQKQVDELVQFRKANSSIFGKGWHNFSVKLMMELIPELYETSEEQMTILTRLGKQKTTSSSNKTKYIDEKLLTEEIYNPVVAKSVRQAIKIVNAAIKEYGDFDNIVIEMARETNEDDEKKAIQKIQKANKDEKDAAMLKAANQYNGKAELPHSVFHGHKQLATKIRLWHQQGERCLYTGKTISIHDLINNPNQFEVDHILPLSITFDDSLANKVLVYATANQEKGQRTPYQALDSMDDAWSFRELKAFVRESKTLSNKKKEYLLTEEDISKFDVRKKFIERNLVDTRYASRVVLNALQEHFRAHKIDTKVSVVRGQFTSQLRRHWGIEKTRDTYHHHAVDALIIAASSQLNLWKKQKNTLVSYSEEQLLDIETGELISDDEYKESVFKAPYQHFVDTLKSKEFEDSILFSYQVDSKFNRKISDATIYATRQAKVGKDKKDETYVLGKIKDIYTQDGYDAFMKIYKKDKSKFLMYRHDPQTFEKVIEPILENYPNKEMNEKGKEVPCNPFLKYKEEHGYIRKYSKKGNGPEIKSLKYYDSKLLGNPIDITPENSKNKVVLQSLKPWRTDVYFNKNTGKYEILGLKYADLQFEKKTGTYKISQEKYNGIMKEEGVDSDSEFKFTLYKNDLLLVKDTETKEQQLFRFLSRTMPNVKYYVELKPYSKDKFEKNESLIEILGSADKSGRCIKGLGKSNISIYKVRTDVLGNQHIIKNEGDKPKLDF

SEQ ID NO: 33 - protein, 1128 aa, Streptococcus thermophilus
MSDLVLGLDIGIGSVGVGILNKVTGEIIHKNSRIFPAAQAENNLVRRTNRQGRRLTRRKKHRIVRLNRLFEESGLITDFTKISINLNPYQLRVKGLTDELSNEELFIALKNMVKHRGISYLDDASDDGNSSVGDYAQIVKENSKQLETKTPGQIQLERYQTYGQLRGDFTVEKDGKKHRLINVFPTSAYRSEALRILQTQQEFNPQITDEFINRYLEILTGKRKYYHGPGNEKSRTDYGRYRTSGETLDNIFGILIGKCTFYPEEFRAAKASYTAQEFNLLNDLNNLTVPTETKKLSKEQKNQIINYVKNEKAMGPAKLFKYIAKLLSCDVADIKGYRIDKSGKAEIHTFEAYRKMKTLETLDIEQMDRETLDKLAYVLTLNTEREGIQEALEHEFADGSFSQKQVDELVQFRKANSSIFGKGWHNFSVKLMMELIPELYETSEEQMTILTRLGKQKRLRLQIKQNISNKTKYIDEKLLTEEIYNPVVAKSVRQAIKIVNAAIKEYGDFDNIVIEMARETNEDDEKKAIQKIQKANKDEKDAAMLKAANQYNGKAELPHSVFHGHKQLATKIRLWHQQGERCLYTGKTISIHDLINNPNQFEVDHILPLSITFDDSLANKVLVYATANQEKGQRTPYQALDSMDDAWSFRELKAFVRESKTLSNKKKEYLLTEEDISKFDVRKKFIERNLVDTRYASRVVLNALQEHFRAHKIDTKVSVVRGQFTSQLRRHWGIEKTRDTYHHHAVDALIIAASSQLNLWKKQKNTLVSYSEEQLLDIETGELISDDEYKESVFKAPYQHFVDTLKSKEFEDSILFSYQVDSKFNRKISDATIYATRQAKVGKDKKDETYVLGKIKDIYTQDGYDAFMKIYKKDKSKFLMYRHDPQTFEKVIEPILENYPNKQMNEKGKEVPCNPFLKYKEEHGYIRKYSKKGNGPEIKSLKYYDSKLLGNPIDITPENSKNKVVLQSLKPWRTDVYFNKATGKYEILGLKYADLQFEKGTGTYKISQEKYNDIKKKEGVDSDSEFKFTLYKNDLLLVKDTETKEQQLFRFLSRTLPKQKHYVELKPYDKQKFEGGEALIKVLGNVANGGQCIKGLAKSNISIYKVRTDVLGNQHIIKNEGDKPKLDF

SEQ ID NO: 34 - protein, 1123 aa, Francisella tularensis
MNVKILPIAIDLDVKNTGVFSAFYQKGTSLEKLDNKNGKVYELSKDSYTLLMNNRTARRHKRRGIDRKQLVKRLFKLVWTEQLNLEWDKDTQQAISFLFNRRGFSFITDGYSTEYLNIVPEQVKAILMDIFDDYNGEDDLDSYLKLATEQESKISEIYNKLMQKILEFKLRKLCTDIKDDKVSTKTLKEITSYEFELLADYLANYSESLKTQKFSYTDKQGNLKELSYYHHDKYNIQEFLKRHATINDEILGTLLTDDFDIWNFNFEKFDFDKNEEKLQNQEDKDHTQAHLHHFVFVVNKIKSEMASGGRHRSQYFQEITNVLDENNHQEGYLKNFCENLHNKKYSNLSVKNLVNLVGNLSNLELKPLRKYFNDKIHAKADHWDEQKFTETYCHWILGEWRVGVKDQDKKDGAKYSYKDLCNELKQKVTKAGLIDFLLELDPCRTIPPYLDNNNRKPPKCQSLILNPKFLDNQYPNWQQYLQELKKLQSIQDYLDSFETDLKDLKSSKDQPYFVEYKSSNQQMASGQRDYKDLDARILQFIFDRVKASDELLLNEIYFQAKKLKQKASSELEKLESSKKLDEVIANSQLSQILKSQHTNGIFEQGTFLHLVCKYYKQRQRARDSRLYIMPEYRYDKKLDKYNNTGRFDDNNQLLTYCNHKPRQKRYQLLNDLAGVLQVSRNQLLSSVEEWFQQAQRVGEISKSQDEQIFEWLKSFKIASYCKAAVEMQKQYRGTLKNAIQTAIFRQSENINKNKNTGNQQQALSENSKDVKSLTADEKKLLKLIENIAKASQKIGESLGLNDKQIKKFNSIYSFAQIQQIAFAKRKGNANTCAVCSADNAHRMQQIKITELVEDNKDNIILSAKAQRLPAIPTRIVDGAVKKMATILAKNIVDDNWQNIKQVLSAKHQLHIPIITESNAFEFEPALADVKGKSLKDRRKKALERISPENIFKDKNNRIKEFAKGISAYSGANLTDGDFDGAKEELDHIIPRSHKKYGTLNDEANLICVTRDDNKNIFAIDTSKWFEIETPSDLRDIGVATIQYKIDNNSRPKVRVKLDYVIDDDSKINYFMNHSLLKSRYPDKVLEILKQSTIIEFESSGFNKTIKEMLGMTLAGIYNETSNN

SEQ ID NO: 35 - protein, 1436 aa, Bacteroides fragilis
MKRILGLDLGTNSIGWALVNEAENKDERSSIVKLGVRVNPLTVDELTNFEKGKSITTNADRTLKRGMRRNLQRYKLRRETLTEVLKEHKLITEDTILSENGNRTTFETYRLRAKAVTEEISLEEFARVLLMINKKRGYKSSRKAKGVEEGTLIDGMDIARELYNNNLTPGELCLQLLDAGKKFLPDFYRSDLQNELDRIWEKQKEYYPEILTDVLKEELRGKKRDAVWAICAKYFVWKENYTEWNKEKGKTEQQEREHKLEGIYSKRKRDEAKRENLQWRVNGLKEKLSLEQLVIVFQEMNTQINNSSGYLGAISDRSKELYFNKQTVGQYQMEMLDKNPNASLRNMVFYRQDYLDEFNMLWEKQAVYHKELTEELKKEIRDIIIFYQRRLKSQKGLIGFCEFESRQIEVDIDGKKKIKTVGNRVISRSSPLFQEFKIWQILNNIEVTVVGKKRKRRKLKENYSALFEELNDAEQLELNGSRRLCQEEKELLAQELFIRDKMTKSEVLKLLFDNPQELDLNFKTIDGNKTGYALFQAYSKMIEMSGHEPVDFKKPVEKVVEYIKAVFDLLNWNTDILGFNSNEELDNQPYYKLWHLLYSFEGDNTPTGNGRLIQKMTELYGFEKEYATILANVSFQDDYGSLSAKAIHKILPHLKEGNRYDVACVYAGYRHSESSLTREEIANKVLKDRLMLLPKNSLHNPVVEKILNQMVNVINVIIDIYGKPDEIRVELARELKKNAKEREELTKSIAQTTKAHEEYKTLLQTEFGLTNVSRTDILRYKLYKELESCGYKTLYSNTYISREKLFSKEFDIEHIIPQARLFDDSFSNKTLEARSVNIEKGNKTAYDFVKEKFGESGADNSLEHYLNNIEDLFKSGKISKTKYNKLKMAEQDIPDGFIERDLRNTQYIAKKALSMLNEISHRVVATSGSVTDKLREDWQLIDVMKELNWEKYKALGLVEYFEDRDGRQIGRIKDWTKRNDHRHHAMDALTVAFTKDVFIQYFNNKNASLDPNANEHAIKNKYFQNGRAIAPMPLREFRAEAKKHLENTLISIKAKNKVITGNINKTRKKGGVNKNMQQTPRGQLHLETIYGSGKQYLTKEEKVNASFDMRKIGTVSKSAYRDALLKRLYENDNDPKKAFAGKNSLDKQPIWLDKEQMRKVPEKVKIVTLEAIYTIRKEISPDLKVDKVIDVGVRKILIDRLNEYGNDAKKAFSNLDKNPIWLNKEKGISIKRVTISGISNAQSLHVKKDKDGKPILDENGRNIPVDFVNTGNNHHVAVYYRPVIDKRGQLVVDEAGNPKYELEEVVVSFFEAVTRANLGLPIIDKDYKTTEGWQFLFSMKQNEYFVFPNEKTGFNPKEIDLLDVENYGLISPNLFRVQKFSLKNYVFRHHLETTIKDTSSILRGITWIDFRSSKGLDTIVKVRVNHIGQIVSVGEY

SEQ ID NO: 36 - protein, 1314 aa, Mycoplasma synoviae
MLRLYCANNLVLNNVQNLWKYLLLLIFDKKIIFLFKIKVILIRRYMENNNKEKIVIGFDLGVASVGWSIVNAETKEVIDLGVRLFSEPEKADYRRAKRTTRRLLRRKKFKREKFHKLILKNAEIFGLQSRNEILNVYKDQSSKYRNILKLKINALKEEIKPSELVWILRDYLQNRGYFYKNEKLTDEFVSNSFPSKKLHEHYEKYGFFRGSVKLDNKLDNKKDKAKEKDEEEESDAKKESEELIFSNKQWINEIVKVFENQSYLTESFKEEYLKLFNYVRPFNKGPGSKNSRTAYGVFSTDIDPETNKFKDYSNIWDKTIGKCSLFEEEIRAPKNLPSALIFNLQNEICTIKNEFTEFKNWWLNAEQKSEILKFVFTELFNWKDKKYSDKKFNKNLQDKIKKYLLNFALENFNLNEEILKNRDLENDTVLGLKGVKYYEKSNATADAALEFSSLKPLYVFIKFLKEKKLDLNYLLGLENTEILYFLDSIYLAISYSSDLKERNEWFKKLLKELYPKIKNNNLEIIENVEDIFEITDQEKFESFSKTHSLSREAFNHIIPLLLSNNEGKNYESLKHSNEELKKRTEKAELKAQQNQKYLKDNFLKEALVPLSVKTSVLQAIKIFNQIIKNFGKKYEISQVVIEMARELTKPNLEKLLNNATNSNIKILKEKLDQTEKFDDFTKKKFIDKIENSVVFRNKLFLWFEQDRKDPYTQLDIKINEIEDETEIDHVIPYSKSADDSWFNKLLVKKSTNQLKKNKTVWEYYQNESDPEAKWNKFVAWAKRIYLVQKSDKESKDNSEKNSIFKNKKPNLKFKNITKKLFDPYKDLGFLARNLNDTRYATKVFRDQLNNYSKHHSKDDENKLFKVVCMNGSITSFLRKSMWRKNEEQVYRFNFWKKDRDQFFHHAVDASIIAIFSLLTKTLYNKLRVYESYDVQRREDGVYLINKETGEVKKADKDYWKDQHNFLKIRENAIEIKNVLNNVDFQNQVRYSRKANTKLNTQLFNETLYGVKEFENNFYKLEKVNLFSRKDLRKFILEDLNEESEKNKKNENGSRKRILTEKYIVDEILQILENEEFKDSKSDINALNKYMDSLPSKFSEFFSQDFINKCKKENSLILTFDAIKHNDPKKVIKIKNLKFFREDATLKNKQAVHKDSKNQIKSFYESYKCVGFIWLKNKNDLEESIFVPINSRVIHFGDKDKDIFDFDSYNKEKLLNEINLKRPENKKFNSINEIEFVKFVKPGALLLNFENQQIYYISTLESSSLRAKIKLLNKMDKGKAVSMKKITNPDEYKIIEHVNPLGINLNWTKKLENNN

SEQ ID NO: 37 - protein, 1368 aa, Streptococcus pyogenes
MDKKYSIGLDIGTNSVGWAVITDDYKVPSKKFKVLGNTDRHSIKKNLIGALLFDSGETAEATRLKRTARRRYTRRKNRICYLQEIFSNEMAKVDDSFFHRLEESFLVEEDKKHERHPIFGNIVDEVAYHEKYPTIYHLRKKLVDSTDKADLRLIYLALAHMIKFRGHFLIEGDLNPDNSDVDKLFIQLVQTYNQLFEENPINASGVDAKAILSARLSKSRRLENLIAQLPGEKKNGLFGNLIALSLGLTPNFKSNFDLAEDAKLQLSKDTYDDDLDNLLAQIGDQYADLFLAAKNLSDAILLSDILRLNSEITKAPLSASMIKRYDEHHQDLTLLKALVRQQLPEKYKEIFFDQSKNGYAGYIDGGASQEEFYKFIKPILEKMDGTEELLAKLNREDLLRKQRTFDNGSIPHQIHLGELHAILRRQEDFYPFLKDNREKIEKILTFRIPYYVGPLARGNSRFAWMTRKSEETITPWNFEEVVDKGASAQSFIERMTNFDKNLPNEKVLPKHSLLYEYFTVYNELTKVKYVTEGMRKPAFLSGEQKKAIVDLLFKTNRKVTVKQLKEDYFKKIECFDSVEISGVEDRFNASLGTYHDLLKIIKDKDFLDNEENEDILEDIVLTLTLFEDREMIEERLKTYAHLFDDKVMKQLKRRRYTGWGRLSRKLINGIRDKQSGKTILDFLKSDGFANRNFMQLIHDDSLTFKEDIQKAQVSGQGDSLHEHIANLAGSPAIKKGILQTVKVVDELVKVMGRHKPENIVIEMARENQTTQKGQKNSRERMKRIEEGIKELGSQILKEHPVENTQLQNEKLYLYYLQNGRDMYVDQELDINRLSDYDVDHIVPQSFIKDDSIDNKVLTRSDKNRGKSNNVPSEEVVKKMKNYWRQLLNAKLITQRKFDNLTKAERGGLSELDKAGFIKRQLVETRQITKHVAQILDSRMNTKYDENDKLIREVKVITLKSKLVSDFRKDFQFYKVREINNYHHAHDAYLNAVVGTALIKKYPKLESEFVYGDYKVYDVRKMIAKSEQEIGKATAKYFFYSNIMNFFKTEITLANGEIRKRPLIETNGETGEIVWDKGRDFATVRKVLSMPQVNIVKKTEVQTGGFSKESILPKRNSDKLIARKKDWDPKKYGGFDSPTVAYSVLVVAKVEKGKSKKLKSVKELLGITIMERSSFEKNPIDFLEAKGYKEVRKDLIVKLPKYSLFELENGRKRMLASAGELQKGNELALPSKYVNFLYLASHYEKLKGSPEDNEQKQLFVEQHKHYLDEIIEQISEFSKRVILADANLDKVLSAYNKHRDKPIREQAENIIHLFTLTNLGAPAAFKYFDTTIDRKRYTSTKEVLDATFIHQSITGLYETRIDLSQLGGD

SEQ ID NO: 38 - protein, 1368 aa, Streptococcus pyogenes
MDKKYSIGLDIGTNSVGWAVITDDYKVPSKKFKVLGNTDRHSIKKNLIGALLFDSGETAEATRLKRTARRRYTRRKNRICYLQEIFSNEMAKVDDSFFHRLEESFLVEEDKKHERHPIFGNIVDEVAYHEKYPTIYHLRKKLVDSTDKADLRLIYLALAHMIKFRGHFLIEGDLNPDNSDVDKLFIQLVQTYNQLFEENPINASGVDAKAILSARLSKSRRLENLIAQLPGEKKNGLFGNLIALSLGLTPNFKSNFDLAEDAKLQLSKDTYDDDLDNLLAQIGDQYADLFLAAKNLSDAILLSDILRVNTEITKAPLSASMIKRYDEHHQDLTLLKALVRQQLPEKYKEIFFDQSKNGYAGYIDGGASQEEFYKFIKPILEKMDGTEELLVKLNREDLLRKQRTFDNGSIPHQIHLGELHAILRRQEDFYPFLKDNREKIEKILTFRIPYYVGPLARGNSRFAWMTRKSEETITPWNFEEVVDKGASAQSFIERMTNFDKNLPNEKVLPKHSLLYEYFTVYNELTKVKYVTEGMRKPAFLSGEQKKAIVDLLFKTNRKVTVKQLKEDYFKKIECFDSVEISGVEDRFNASLGTYHDLLKIIKDKDFLDNEENEDILEDIVLTLTLFEDREMIEERLKTYAHLFDDKVMKQLKRRRYTGWGRLSRKLINGIRDKQSGKTILDFLKSDGFANRNFMQLIHDDSLTFKEDIQKAQVSGQGDSLHEHIANLAGSPAIKKGILQTVKVVDELVKVMGRHKPENIVIEMARENQTTQKGQKNSRERMKRIEEGIKELGSQILKEHPVENTQLQNEKLYLYYLQNGRDMYVDQELDINRLSDYDVDHIVPQSFLKDDSIDNKVLTRSDKNRGKSDNVPSEEVVKKMKNYWRQLLNAKLITQRKFDNLTKAERGGLSELDKAGFIKRQLVETRQITKHVAQILDSRMNTKYDENDKLIREVKVITLKSKLVSDFRKDFQFYKVREINNYHHAHDAYLNAVVGTALIKKYPKLESEFVYGDYKVYDVRKMIAKSEQEIGKATAKYFFYSNIMNFFKTEITLANGEIRKRPLIETNGETGEIVWDKGRDFATVRKVLSMPQVNIVKKTEVQTGGFSKESILPKRNSDKLIARKKDWDPKKYGGFDSPTVAYSVLVVAKVEKGKSKKLKSVKELLGITIMERSSFEKNPIDFLEAKGYKEVKKDLIIKLPKYSLFELENGRKRMLASAGELQKGNELALPSKYVNFLYLASHYEKLKGSPEDNEQKQLFVEQHKHYLDEIIEQISEFSKRVILADANLDKVLSAYNKHRDKPIREQAENIIHLFTLTNLGAPAAFKYFDTTIDRKRYTSTKEVLDATLIHQSITGLYETRIDLSQLGGD

SEQ ID NO: 39 - protein, 1370 aa, Streptococcus agalactiae; identical to SEQ ID NO: 19

SEQ ID NO: 40 - protein, 1173 aa, Rhodospirillum rubrum
MRPIEPWILGLDIGTDSLGWAVFSCEEKGPPTAKELLGGGVRLFDSGRDAKDHTSRQAERGAFRRARRQTRTWPWRRDRLIALFQAAGLTPPAAETRQIALALRREAVSRPLAPDALWAALLHLAHHRGFRSNRIDKRERAAAKALAKAKPAKATAKATAPAKEADDEAGFWEGAEAALRQRMAASGAPTVGALLADDLDRGQPVRMRYNQSDRDGVVAPTRALIAEELAEIVARQSSAYPGLDWPAVTRLVLDQRPLRSKGAGPCAFLPGEDRALRALPTVQDFIIRQTLANLRLPSTSADEPRPLTDEEHAKALALLSTARFVEWPALRRALGLKRGVKFTAETERNGAKQAARGTAGNLTEAILAPLIPGWSGWDLDRKDRVFSDLWAARQDRSALLALIGDPRGPTRVTEDETAEAVADAIQIVLPTGRASLSAKAARAIAQAMAPGIGYDEAVTLALGLHHSHRPRQERLARLPYYAAALPDVGLDGDPVGPPPAEDDGAAAEAYYGRIGNISVHIALNETRKIVNALLHRHGPILRLVMVETTRELKAGADERKRMIAEQAERERENAEIDVELRKSDRWMANARERRQRVRLARRQNNLCPYTSTPIGHADLLGDAYDIDHVIPLARGGRDSLDNMVLCQSDANKTKGDKTPWEAFHDKPGWIAQRDDFLARLDPQTAKALAWRFADDAGERVARKSAEDEDQGFLPRQLTDTGYIARVALRYLSLVTNEPNAVVATNGRLTGLLRLAWDITPGPAPRDLLPTPRDALRDDTAARRFLDGLTPPPLAKAVEGAVQARLAALGRSRVADAGLADALGLTLASLGGGGKNRADHRHHFIDAAMIAVTTRGLINQINQASGAGRILDLRKWPRTNFEPPYPTFRAEVMKQWDHIHPSIRPAHRDGGSLHAATVFGVRNRPDARVLVQRKPVEKLFLDANAKPLPADKIAEIIDGFASPRMAKRFKALLARYQAAHPEVPPALAALAVARDPAFGPRGMTANTVIAGRSDGDGEDAGLITPFRANPKAAVRTMGNAVYEVWEIQVKGRPRWTHRVLTRFDRTQPAPPPPPENARLVMRLRRGDLVYWPLESGDRLFLVKKMAVDGRLALWPARLATGKATALYAQLSCPNINLNGDQGYCVQSAEGIRKEKIRTTSCTALGRLRLSKKAT

SEQ ID NO: 41 - protein, 997 aa, Maritimibacter alkaliphilus
MKVLVDAGLMPSDPAAAKALETLDPYELRATGLDVMLPLTHLGRAVFHLNQRRGFKSNRKTDRGDNESGKIKDATKRLTWAMQEAGARTYGEFLHMRRARASDPRQVPSVRTRLSVASRGGPDSKEEAGYDFYPERAHLEDEFHALWSAQAAFHPDLTCELRDVVFEKIFYQRPLKEPKVGLCLFTAEERLPKAHPLTGRRVLYETVNQLRVTADGRTTRPLTLEERDMIVYALDNKKPVKSLSSMHLKLVALGKLVKLKDGERFTLESGVRDAIACDPIRATMGHPDGFGPAWSRLDWQAQWALIEKLRQVQSDDDFASLVAWLGATHNLSEDHAKRVANLHLPEGYGRLGLTATEAILCNLKAEVCTYSQAVERWGKHHSNQRTGECLEALPYYGEVLDRHVIPGTYNEDDDDVTRYGRITNPTVHIGLNQLRRLVNRIIATYGKPDQIVVELARELKQSEAQKSEALKKIRDTTADAIRRGRQLEEIGQKNTGANRLLLRLWEDLGPAVGPRCCPYTGKPISVTMLFDGACDVDHILPYSRTLDDSFANRTICLREANRQKGDRTPWEAWGGSDQWDAIEANLKDLPENKRKRFAPDAMERFEGERDFLDRALVDTQYLARISRAYLDTLFTEGGHVWVVPGRMTEMLRRHWGLNALLSDKDRGAGKVKNRTDHRHHAIDAAVIAATDHSLVNRISKAAGQGESAGQSAELIARDTPEPWEGFRNDISAQIARIVVSHRADHGRIDVEGRKHGKDSTAGRLHNDTAYGIVDDHTVVSRTPLLSLKPGDIEVTTKGKNIRDTQLQKALSVATTGKDGKGFEEALRNFAEKEGPYQGIRRVRLIETLQSSARVEVGSDEDGQPLKAYKGDSNHCYDLWKLPDGKVVPHVVSTYEAHAGTDKRPHPAAKRILRVFKKDMVAIEQDDQTAIFYVQKLDRANGLFLAPHLEANADARHRNPNDAFKFLQMGAGSVVRNKLRRVYVDEIGRIKDPGPPKH

SEQ ID NO: 42 - protein, 1027 aa, Blastopirellula marina
MFSESGDQPSLVDCGVRIFPEGVERDQQGGEKSKSQSRRVARGIRRQVRRRAQRLRHLKHALITTGLFPADVVDQQEVLASNPYELRSRALSEKLEPYEIGRILLHLAKRRGFLSNRTTDRSGGNELKGILAEMTQLQGEIAAHGCQTLGQYLHQLGDDGETFAQRLRGRHTLRAMYEDEFEKIWERQASYYPALLTEELRGGEEGKQSYPLVPTARRKSESLLKRFGLHGLLFFQRKMYWPKSVIGRCDLEPKEKRCPKADRLAQRFRILQEVNNLRLISPADRKEYTFAEFVGAGADKKLVDYLCEAKERTFPQIRKKFKLPETISFNYERGERSKLQGHETDAHFNGKKGLGKRRWSEIAEDVKDHIIQIVLEEDREDVALRKLTQDCSLTVEEAHKAMALHLPAGYSQYSRVAISRLLPHLELGKLLMGNDASDSAMHAAGYLRPDEREVRQYDLLPEPPDIPNPLVRQALYEVRKVINAIIREYGALGTIRVELAREAKKSAEQRTQIRIANAKRERENAAIAKTLQEMSPAIRPTRRNIQRYLLWKDQGGVCIYTGKVISQAQLFDSGEVDVDHILPRWRSLDDSMANKVIAHRSANNEKGDRTPWEWLGHDKPRFDELLLRAQRLPYGKRQRFIQKEVELTNFVERQLRDTTYVSRLVVQYLKGLGVPITTVKGPMTAELRHHWGLNALLNEDGSQKKNRSDHRHHAIDAIVIGLTDAKRLHALANARGKDLQPPWSEFRSDVATALGRMAVSHRVRRRIQGALHEETIYGPTQKAAQPTSTDQRPWAKDWIEDSQIVVRRKSVSDLTNTKHLAKIRDVTIRKILEDHLRRQKVDPTKPGVIPKDAFAGSNAPQMPSGVPIKKVRLVERGETWRKIGSGEASKFIKPGSNHHISYFAISRKGRESWKAHVTIMLDAACIAKESINNGKIVNRSIGDQGRFLMSLSIGEMFEITNNGGEILLCVVRKIDQSGRIYYKIHDDARESMDLKKDNLYMSPSKMQQFDARKVTVTPLGKIRNAND

SEQ ID NO: 43 - protein, 158 aa, Francisella tularensis
MIDFLLELDPCITIPPYLDNNNRKPPKCQSLILNPKFLDNQYPNWQQYLQELKKLQSIQDYLDSFETDLKDLKSSKDQPYFVEYKSSNQQMASGQRDYKDLDARILQFIFDRVKASDELLLSEIYFQAKKLKQKASSELEKLESSKKLDEVIANSQLS

SEQ ID NO: 44 - protein, 393 aa, Francisella tularensis
MNVKILPIAIDLDVKNTGVFSAFYQKGTSLEKLDNKNGKVYELSKDSYTLLMNNRTAQRHQRRGIDRKQLVKRLFKLVWTEQLNLEWDKDTQQAISFLFNRRGFSFITDGYSTEYLNIVPEQVKAILMDIFDDYNGEDDLDSYLKLATEQESKISEIYNKLMQKILEFKLRKLCTDIKDDKVSTKTLKEITSYEFELLADYLANYSESLKTQKFSYTDKQGNLKELSYYHHDKYNIQEFLKRHATINDEILDTLLTDDFDIWNFNFEKFDFDKNEEKLQSQEDKDHTQAYFHHFVFAVNKIKSEMASGGRHRSQYFQEITNVLDENNHQEGYLKNFCENLHNKKYSNLSVKNLVNLVGNLSNLELKPLRKYFNDKNLIIGMSKSLQKLIATGY

SEQ ID NO: 45 - protein, 1066 aa, Rhodopseudomonas palustris
MSERVVRRILGIDLGIASCGWGVVDISGAGGGIIATGVRCFDAPLIDKTGEPKSATRRTARGQRRIVRRRRQRMNGVRRLLCEFGLLPDPRPDALNQAMRRISTASAAAQVTPWTLRAAAHQRLLSNEELAVVLGHIARHRGFRSNAKNEAGANAADETSKMKKAMEATREGLAKYHAFGDMIANDPKFANRKRNRDKDYSHTAKRSDLEDEVRAILRAQLRFGSAAATETLAQTFADVAFFQRPLQDSEDRVGDCPFEPGQKRAARRAPSFELFRFLSRLANLKLAVGRSPERRLTAEEIALAAKGFGETKKTITFKSLREALDLDPNARFSGIGKDKEASLDVVARTGGAAYGTKTLKDALGDAPWRSLSRTPETLDRIAEILSFREDITSIRNGLEDLGLDSLVVEALMQAAANGDFKEFTRAGHISARAARNIIPGLREGLVYSEACARVGYDHAARLSVPLDQVGSPVTRKALSEALKQVRAVAREYGPIDYFHIELARSVGKSAEERKQLTDGIEARNVEKAKRRKQAEEHLGRAPSDDELLRYELAKEQNFKCIYSGDAIDPAGVAANDTRYQVDHILPWSRFGDDSYLNKTLCTARSNQNKRGRTPFEWFEADKTDVEWMEYVARVENLQEVKGRKKRNYSIKDAAAIEDKFKARNLTDTQWATRLLADELSRMFPPRECERAICGRADGGNDGLTIVEERRVFTRPGAITSKLRRAWGLEGLKKQDGKRVEDDRHHAVDALVLAATTESLLQRLTVEVQRREREGRPDDIFHCAEPWRGFRADVRRTVYGSETMPGIFVSRAERRRARGKAHDATIKQIREIEGERLVFERKPVEKLTDKDLEKIPIPKPYGQVSDPKRLRDELVESLRAWIAAGKPKDRPPLSPKGDVIRKVRIQTNDKVSVEINGGTVDRGDMARVDVFRKKNKKAVWEYYVVPIYPHQIVALNDPPDRAVIAYAEDKDWKEIDSSYEFLWSLFGLSYVEISKANGECIDGYFRGLHRGTGAASVCKHISLGKDATVSGIGLKTLASFKKFTIDRLGRKFEIPREVRTWRGEACT

SEQ ID NO: 46 - protein, 1149 aa, Lactobacillus salivarius
MERYHIGLDIGTSSIGWAVIGDDFKIKRKKGKNLIGVRLFKEGDTAAERRGFRTQRRRLNRRKWRLKLLEEIFDPYMAEVDKYFFARLKESNLSPKDSNKKYLGSLLFPDISDSNFYDKYPTIYHLRRDLMEKDKKFDLREIYLAIHHIVKYRGNFLEKVPAKNYKNSGASIGFLLEEVNDLYGNIIGNEDVAILDNDKFEDVEKIILNDEIRNIDKQKNVGRLLVKDKKEKNIVTAFSKAIFGYKFNLEDLLLIESDEKNKLTFNDENIDDIFNELSHSLNDNQMDLLTKTREIYFKFKLNMIVPTGYTISESMIEKYEMHKAHLKMYKEFINTLNAKDRKILKNAYSDYINNEKAKAANAQENFYKTVKKTIKENDSDTAKKIIGLIDEGNFMPKQRTGENGVIPHQLHQIELDRIIENQAKYYPWLAEENPVEKNRKFAKYKLDELVTFRVPYYVGPLIDKTESNKNEKETKFAWMVRKAKGTITPWNFENLVDRTESANRFIKRMTSKDTYIIGEDVLPASSLLYEKYKVLNELNNIKVNKKKLDVEQKQHVYLDLFTTRKNVTKDDLATSLNCDVESITGLTDNKKFNSSLSSYIDLKAILGNIVDDYSKNEDLEKIIEYSTIFEDGNIYKEKLSEISWLTDEQIEKLSNIHFKGWGRLSKKLLTQITNENGERIIDTLWNTSNNFIQVISDESIQAKLAEINGEYANKYNLEDILDEAYTSPQNKKAIRQVMKVVEDIEKAMKCEPTSIAIEFTREKRKSKLTNTRYKKISETYEKITDELISEYELGKLQSELDSKVNNMRDRYYLYFMQLGRDMYTGEKMNIDELHQKYDIDHILPQSFIKDDSLNNRVLTSKSVNIKEKSDKTAADLYAAKMGDFWRKLRKQGLMTEQKYKNLLTRTDSINKYTKQSFIKRQLVETSQVVKLAANILQDKYRNTKIIEIRARLNSDLRKKYELIKNREVNDYHHAIDGYLTTFVGQYLYKVYPKLRSYFVYDDFKKLDSNYLKHMDKFNFIWKLEDKKAEDVYDKVNDEFVLNVPEMKEYIRKIYNYKYMLVSKEVTTKNGAFYDQTKYNAKTINLIPIKKDKPTNIYGGYKGKVSSYMMLVKIQKKKEVIYKFVGVPRLWTDELDRLIDTDEKKALLKK

SEQ ID NO: 47 - protein, 1064 aa, Rhodopseudomonas palustris
MSECVTRRILGIDLGIASCGWGVIEVGEASGSIIASGVRCFDAPLIDKTGEPKSATRRTARGQRRIIRRRRQRMNAVRRLLAEFGVLTGRSPDALHQALLRLSQSVAGSQVTPWTLRAAAHERKLTNDELAVVLGHIARHRGFRSNSKNDGGANAADETSKMKKAMETTREGLARYHSFGAMIASDPKFADRKRNRDKDYSHTAKRSDLEDEVRTIFRSQTRFGSLVASEKLSQAFADAAFFQRPLQDSEDMVGSCPFEPGQKRTARRAPSFELFRFLSRLANLKLTVGRAPERRLTPDEIALAAKGFGETKKSITFKSLREALDLDPNARFSGVAKEKESTLDVAARTGGAAYGTKTLKDALGDAPWRSLSRMPEKLDRIAEILSFREDMKAIRNGLEEVGLDGLVVDALMQATANGDFKDFTRAAHISALAARNIIPGLREGLVYSDACTRVGYDHAARPAVPLSQIGSPVTRKALSEALKQVRAVAREYGPIDYFHIELARSIGKSAEERKKLTDGIEARNVEKEKRRKEAAEHLGRAPSDDELLRYELAKEQNFKCIYSGDPIDPAGISANDTRYQVDHILPWSRFGDDSYVNKTLCTARSNQNKRGRTPFEWFDADKTEAEWMEYSARVEDLKEVKGRKKRNYSIKDAASVEDKFKARNLTDTQWATRLLADELKRMFPPRECERVVTVRADGGNDGLSIVEERRVFTRPGAITSKLRRAWGLEGLKKQDGKRVEDDRHHAVDALVLAATTESLLNRLTVEVQQREREGRQDDIFHCSQPWPGFRVDVQRTVYGSETMPGIFVSRAERRRARGKAHDATVKQIRDIDGERIVFERKPIEKLTDKDLERIPVPEPYGKAADPKKLRDELVENLRAWIAAGKPKDKPPRSPKGDIIRKVRIETKDKVAVEINGGTVDRGDMARVDVFRKKNKKGVWEFYVIPIYPHQIVASALPPNRAVIAYKAESEWTAIDGCFEFAWSLNPMSYLELVKSNGELIEGYFRSMDRTTGAINLSPMSTNSETIRSIGVKTLSSFRKFTVDRLGRKFEIPREVRTWRGEACT

SEQ ID NO: 48 - protein, 1166 aa, Nitrobacter hamburgensis
MHVEIDFPHFSRGDSHLAMNKNEILRGSSVLYRLGLDLGSNSLGWFVTHLEKRGDRHEPVALGPGGVRIFPDGRDPQSGTSNAVDRRMARGARKRRDRFVERRKELIAALIKYNLLPDDARERRALEVLDPYALRKTALTDTLPAHHVGRALFHLNQRRGFQSNRKTDSKQSEDGAIKQAASRLATDKGNETLGVFFADMHLRKSYEDRQTAIRAELVRLGKDHLTGNARKKIWAKVRKRLFGDEVLPRADAPHGVRARATITGTKASYDYYPTRDMLRDEFNAIWAGQSAHHATITDEARTEIEHIIFYQRPLKPAIVGKCTLDPATRPFKEDPEGYRAPWSHPLAQRFRILSEARNLEIRDTGKGSRRLTKEQSDLVVAALLANREVKFDKLRTLLKLPAEARFNLESDRRAALDGDQTAARLSDKKGFNKAWRGFPPERQIAIVARLEETEDENELIAWLEKECALDGAAAARVANTTLPDGHCRLGLRAIKKIVPIMQDGLDEDGVAGAGYHIAAKRAGYDHAKLPTGEQLGRLPYYGQWLQDAVVGSGDARDQKEKQYGQFPNPTVHIGLGQLRRVVNDLIDKYGPPTEISIEFTRALKLSEQQKAERQREQRRNQDKNKARAEELAKFGRPANPRNLLKMRLWEELAHDPLDRKCVYTGEQISIERLLSDEVDIDHILPVAMTLDDSPANKIICMRYANRHKRKQTPSEAFGSSPTLQGHRYNWDDIAARATGLPRNKRWRFDANAREEFDKRGGFLARQLNETGWLARLAKQYLGAVTDPNQIWVVPGRLTSMLRGKWGLNGLLPSDNYAGVQDKAEEFLASTDDMEFSGVKNRADHRHHAIDGLVTALTDRSLLWKMANAYDEEHEKFVIEPPWPTMRDDLKAALEKMVVSHKPDHGIEGKLHEDSAYGFVKPLDATGLKEEEAGNLVYRKAIESLNENEVDRIRDIQLRTIVRDHVNVEKTKGVALADALRQLQAPSDDYPQFKHGLRHVRILKKEKGDYLVPIANRASGVAYKAYSAGENFCVEVFETAGGKWDGEAVRRFDANKKNAGPKIAHAPQWRDANEGAKLVMRIHKGDLIRLDHEGRARIMVVHRLDAAAGRFKLADHNETGNLDKRHATNNDIDPFRWLMASYNTLKKLAAVPVRVDELGRVWRVMPN

SEQ ID NO: 49 - protein, 641 aa, Nitrobacter hamburgensis
MHKRNSRSYRLGLDLGSNSLGWFVTHLEKRGDRYEPVALDPGGVRIFPDGRDPQSGMSNAVDRRMARGARKRRDRFVDPYALRKAALTNALPAHRVGRAIFHLNQRRGFQSNRKTDRKQSEDGAIKQAASKLKARMHEEAAPTLGAFFADMHLRKSYDDQQTAIRAELVRLGKDHLTGNARKKVWAKVRKRLFGDEVLRPKDTSDGARARATTTGTKASYDFYPTRAMLLDEFNAIWAAQREHHLAMTDEAKAEIEHIIFYHRPLKPAIVGKCTLDPATRPFKEDPEGYRAPWSHPLAQRFRILSEARNLEIRETGKTSRRLTKDQSDLVVAALLANREVKFDKLRTLLKLPAEARFNLESDRRSTATRPPHGCRTRRASIRRGAGFLRNGRSRSSPDWKKPKTKTNCSHGSKWNAHLTAQRPRASPIRRCRTAIAGSACAQSKRSCRSCRTSSMRMALRAPAITSWPSVPATTIPVDTFQQGGNAFGRILSVVTIELFAITDRVDPVQEQDARCFALRIAECRSDGLQHFAEVSLGLPPRNAAQDQRHSAGLCQSSCVGRFVPGTPCRRTPRSTSLHGKEPSAHAFGSTARSRPQLPASPRPCMSFRDGTSSSPARMPETLDRCAISRSNRSSVCRAERL

SEQ ID NO: 50 - protein, 1368 aa, Streptococcus pyogenes
MDKKYSIGLDIGTNSVGWAVITDDYKVPSKKFKVLGNTDRHSIKKNLIGALLFDSGEIAEATRLKRTARRRYTRRKNRICYLQEIFSNEMAKVDDSFFHRLEESFLVEEDKKHERHPIFGNIVDEVAYHEKYPTIYHLRKKLVDSTDKADLRLIYLALAHMIKFRGHFLIEGDLNPDNSDVDKLFIQLVQTYNQLFEENPINASGVDAKAILSARLSKSRRLENLIAQLPGEKKNGLFGNLIALSLGLTPNFKSNFDLAEDAKLQLSKDTYDDDLDNLLAQIGDQYADLFLAAKNLSDAILLSDILRLNSEITKAPLSASMIKRYDEHHQDLTLLKALVRQQLPEKYKEIFFDQSKNGYAGYIDGGASQEEFYKFIKPILEKMDGTEELLAKLNREDLLRKQRTFDNGSIPHQIHLGELHAILRRQEDFYPFLKDNREKIEKILTFRIPYYVGPLARGNSRFAWMTRKSEETITPWNFEEVVDKGASAQSFIERMTNFDKNLPNEKVLPKHSLLYEYFTVYNELTKVKYVTEGMRKPAFLSGEQKKAIVDLLFKTNRKVTVKQLKEDYFKKIECFDSVEISGVEDRFNASLGTYHDLLKIIKDKDFLDNEENEDILEDIVLTLTLFEDREMIEERLKTYAHLFDDKVMKQLKRRRYTVWGRLSRKLINGIRDKQSGKTILDFLKSDGFANRNFMQLIHDDSLTFKEDIQKAQVSGQGDSLHEHIANLAGSPAIKKGILQTVKVVDELVKVMGRHKPENIVIEMARENQTTQKGQKNSRERMKRIEEGIKELGSQILKEHPVENTQLQNEKLYLYYLQNGRDMYVDQELDINRLSDYDVDHIVPQSFIKDDSIDNKVLTRSDKNRGKSDNVPSEEVVKKMKNYWRQLLNAKLITQRKFDNLTKAERGGLSELDKAGFIKRQLVETRQITKHVAQILDSRMNTKYDENDKLIREVKVITLKSKLVSDFRKDFQFYKVREINNYHHAHDAYLNAVVGTALIKKYPKLESEFVYGDYKVYDVRKMLAKSEQEIGKATAKYFFYSNIMNFFKTEITLANGEIRKRPLIETNGETGEIVWDKGRDFATVRKVLSMPQVNIVKKTEVQTGGFSKESILPKRNSDKLIARKKDWDPKKYGGFDSPTVAYSVLVVAKVEKGKSKKLKSVKELLGITIMERSSFEKNPIDFLEAKGYKEVRKDLIIKLPKYSLFELENGRKRMLASAGELQKGNELALPSKYVNFLYLASHYEKLKGSPEDNEQKQLFVEQHKHYLDEIIEQISEFSKRVILADANLDKVLSAYNKHRDKPIREQAENIIHLFTLTNLGAPTAFKYFDTTIDRKRYTSTKEVLDATFIHQSITGLYETRIDLSQLGGD

SEQ ID NO: 51 - protein, 1368 aa, Streptococcus pyogenes
MDKKYSIGLDIGTNSVGWAVITDDYKVPSKKFKVLGNTDRHSIKKNLIGALLFDSGETAEATRLKRTARRRYTRRKNRICYLQEIFSNEMAKVDDSFFHRLEESFLVEEDKKHERHPIFGNIVDEVAYHEKYPTIYHLRKKLVDSTDKADLRLIYLALAHMIKFRGHFLIEGDLNPDNSDVDKLFIQLVQTYNQLFEENPINASGVDAKAILSARLSKSRRLENLIAQLPGEKKNGLFGNLIALSLGLTPNFKSNFDLAEDAKLQLSKDTYDDDLDNLLAQIGDQYADLFLAAKNLSDAILLSDILRLNSEITKAPLSASMIKRYDEHHQDLTLLKALVRQQLPEKYKEIFFDQSKNGYAGYIDGGASQEEFYKFIKPILEKMDGTEELLAKLNREDLLRKQRTFDNGSIPHQIHLGELHAILRRQEDFYPFLKDNREKIEKILTFRIPYYVGPLARGNSRFAWMTRKSEETITPWNFEEVVDKGASAQSFIERMTNFDKNLPNEKVLPKHSLLYEYFTVYNELTKVKYVTEGMRKPAFLSGEQKKAIVDLLFKTNRKVTVKQLKEDYFKKIECFDSVEISGVEDRFNASLGTYHDLLKIIKDKDFLDNEENEDILEDIVLTLTLFEDREMIEERLKTYAHLFDDKVMKQLKRRRYTGWGRLSRKLINGIRDKQSGKTILDFLKSDGFANRNFMQLIHDDSLTFKEDIQKAQVSGQGDSLHEHIANLAGSPAIKKGILQTVKVVDELVKVMGRHKPENIVIEMARENQTTQKGQKNSRERMKRIEEGIKELGSQILKEHPVENTQLQNEKLYLYYLQNGRDMYVDQELDINRLSDYDVDHIVPQSFIKDDSIDNKVLTRSDKNRGKSDNVPSEEVVKKMKNYWRQLLNAKLITQRKFDNLTKAERGGLSELDKAGFIKRQLVETRQITKHVAQILDSRMNTKYDENDKLIREVKVITLKSKLVSDFRKDFQFYKVREINNYHHAHDAYLNAVVGTALIKKYPKLESEFVYGDYKVYDVRKMIAKSEQEIGKATAKYFFYSNIMNFFKTEITLANGEIRKRPLIETNGETGEIVWDKGRDFATVRKVLSMPQVNIVKKTEVQTGGFSKESILPKRNSDKLIARKKDWDPKKYGGFDSPTVAYSVLVVAKVEKGKSKKLKSVKELLGLTIMERSSFEKNPIDFLEAKGYKEVKKDLIIKLPKYSLFELENGRKRMLASAGELQKGNELALPSKYVNFLYLASHYEKLKGSPEDNEQKQLFVEQHKHYLDEIIEQISEFSKRVILADANLDKVLSAYNKHRDKPIREQAENIIHLFTLTNLGAPAAFKYFDTTIDRKRYTSTKEVLDATLIHQSITGLYETRIDLSQLGGD

SEQ ID NO: 52 - protein, 1368 aa, Streptococcus pyogenes
MDKKYSIGLDIGTNSVGWAVITDDYKVPSKKFKVLGNTDRHSIKKNLIGALLFDSGEIAEATRLKRTARRRYTRRKNRICYLQEIFSNEMAKVDDSFFHRLEESFLVEEDKKHERHPIFGNIVDEVAYHEKYPTIYHLRKKLVDSTDKADLRLIYLALAHMIKFRGHFLIEGDLNPDNSDVDKLFIQLVQTYNQLFEENPINASGVDAKAILSARLSKSRRLENLIAQLPGEKKNGLFGNLIALSLGLTPNFKSNFDLAEDAKLQLSKDTYDDDLDNLLAQIGDQYADLFLAAKNLSDAILLSDILRLNSEITKAPLSASMIKRYDEHHQDLTLLKALVRQQLPEKYKEIFFDQSKNGYAGYIDGGASQEEFYKFIKPILEKMDGTEELLAKLNREDLLRKQRTFDNGSIPHQIHLGELHAILRRQEDFYPFLKDNREKIEKILTFRIPYYVGPLARGNSRFAWMTRKSEETITPWNFEEVVDKGASAQSFIERMTNFDKNLPNEKVLPKHSLLYEYFTVYNELTKVKYVTEGMRKPAFLSGEQKKAIVDLLFKTNRKVTVKQLKEDYFKKIECFDSVEISGVEDRFNASLGTYHDLLKIIKDKDFLDNEENEDILEDIVLTLTLFEDREMIEERLKTYAHLFDDKVMKQLKRRRYTGWGRLSRKLINGIRDKQSGKTILDFLKSDGFANRNFMQLIHDDSLTFKEDIQKAQVSGQGDSLHEHIANLAGSPAIKKGILQTVKVVDELVKVMGRHKPENIVIEMARENQTTQKGQKNSRERMKRIEEGIKELGSQILKEHPVENTQLQNEKLYLYYLQNGRDMYVDQELDINRLSDYDVDHIVPQSFIKDDSIDNKVLTRSDKNRGKSDNVPSEEVVKKMKNYWRQLLNAKLITQRKFDNLTKAERGGLSELDKAGFIKRQLVETRQITKHVAQILDSRMNTKYDENDKLIREVKVITLKSKLVSDFRKDFQFYKVREINNYHHAHDAYLNAVVGTALIKKYPKLESEFVYGDYKVYDVRKMLAKSEQEIGKATAKYFFYSNIMNFFKTEITLANGEIRKRPLIETNGETGEIVWDKGRDFATVRKVLSMPQVNIVKKTEVQTGGFSKESILPKRNSDKLIARKKDWDPKKYGGFDSPTVAYSVLVVAKVEKGKSKKLKSVKELLGITIMERSSFEKNPIDFLEAKGYKEVRKDLIIKLPKYSLFELENGRKRMLASAGELQKGNELALPSKYVNFLYLASHYEKLKGSPEDNEQKQLFVEQHKHYLDEIIEQISEFSKRVILADANLDKVLSAYNKHRDKPIREQAENIIHLFTLTNLGAPTAFKYFDTTIDRKRYTSTKEVLDATFIHQSITGLYETRIDLSQLGGD

SEQ ID NO: 53 - protein, 1371 aa, Streptococcus pyogenes
MDKKYSIGLDIGTNSVGWAVITDDYKVPSKKFKVLGNTDRHSIKKNLIGALLFDSGETAEATRLKRTARRRYTRRKNRICYLQEIFSNEMAKVDDSFFHRLEESFLVEEDKKHERHPIFGNIVDEVAYHEKYPTIYHLRKKLADSTDKADLRLIYLALAHMIKFRGHFLIEGDLNPDNSDVDKLFIQLVQTYNQLFEENPINASRVDAKAILSARLSKSRRLENLIAQLPGEKKNGLFGNLIALSLGLTPNFKSNFDLAEDAKLQLSKDTYDDDLDNLLAQIGDQYADLFLAAKNLSDATLLSDILRVNSEITKAPLSASMIKRYDEHHQDLTLLKALVRQQLPEKYKEIFFDQSKNGYAGYIDGGASQEEFYKFIKPILEKMDGTEELLAKLNREDLLRKQRTFDNGSIPHQIHLGELHAILRRQEDFYPFLKDNREKIEKILTFRIPYYVGPLARGNSRFAWMTRKSEETITPWNFEEVVDKGASAQSFIERMTNFDKNLPNEKVLPKHSLLYEYFTVYNELTKVKYVTEGMRKPAFLSGEQKKAIVDLLFKTNRKVTVKQLKEDYFKKIECFDSVEISGVEDRFNASLGTYHDLLKIIKDKDFLDNEENEDILEDIVLTLTLFEDKEMIEERLKTYAHLFDDKVMKQLKRRHYTGWGRLSRKLINGIRDKQSGKTILDFLKSDGFANRNFIQLIHDDSLTFKEAIQKAQVSGQGHSLHEQIANLAGSPAIKKGILQSVKVVDELVKVMGHKPENIVIEMARENQTTQKGQKNSRERMKRIEEGIKELGSQILKEHPVENTQLQNEKLYLYYLQNGRDMYVDQELDINRLSDYDVDHIVPQSFIKDDSIDNKVLTRSDKNRGKSDDVPSEEVVKKMKNYWRQLLNAKLITQRKFDNLTKAERGGLSELDKAGFIKRQLVETRQITKHVAQILDSRMNTKYDENDKLIREVKVITLKSKLVSDFRKDFQFYKVREINNYHHAHDAYLNAVVGTALIKKYPKLESEFVYGDYKVYDVRKMIAKSEQEIGKATAKRFFYSNIMNFFKTEITLANGEIRKRPLIETNEETGEIVWDKGRDFATVRKVLSMPQVNIVKKTEVQTGALTNESIYARGSFDKLISRKHRFESSKYGGFGSPTVTYSVLVVAKSKVQDGKVKKIKTGKELIGITLLDKLVFEKNPLKFIEDKGYGNVQIDKCIKLPKYSLFEFENGTRRMLASVMANNNSRGDLQKANEMFLPAKLVTLLYHAHKIESSKELEHEAYILDHYNDLYQLLSYIERFASLYVDVEKNISKVKELFSNIESYSISEICSSVINLLTLTASGAPADFKFLGTTIPRKRYGSPQSILSSTLIHQSITGLYETRIDLSQLGSD

SEQ ID NO: 54 - protein, 1121 aa, Streptococcus thermophilus
MSDLVLGLDIGIGSVGVGILNKVTGEIIHKNSRIFPAAQAENNLVRRTNRQGRRLARRKKHRRVRLNRLFEESGLITDFTKISINLNPYQLRVKGLTDELSNEELFIALKNMVKHRGISYLDDASDDGNSSVGDYAQIVKENSKQLETKTPGQIQLERYQTYGQLRGDFTVEKDGKKHRLINVFPTSAYRSEALRILQTQQEFNPQITDEFINRYLEILTGKRKYYHGPGNEKSRTDYGRYRTSGETLDNIFGILIGKCTFYPDEFRAAKASYTAQEFNLLNDLNNLTVPTETKKLSKEQKNQIINYVKNEKAMGPAKLFKYIAKLLSCDVADIKGYRIDKSGKAEIHTFEAYRKMKTLETLDIEQMDRETLDKLAYVLTLNTEREGIQEALEHEFADGSFSQKQVDELVQFRKANSSIFGKGWHNFSVKLMMELIPELYETSEEQMTILTRLGKQKTTSSSNKTKYIDEKLLTEEIYNPVVAKSVRQAIKIVNAAIKEYGDFDNIVIEMARETNEDDEKKAIQKIQKANKDEKDAAMLKAANQYNGKAELPHSVFHGHKQLATKIRLWHQQGERCLYTGKTISIHDLINNSNQFEVDHILPLSITFDDSLANKVLVYATANQEKGQRTPYQALDSMDDAWSFRELKAFVRESKTLSNKKKEYLLTEEDISKFDVRKKFIERNLVDTRYASRVVLNALQEHFRAHKIDTKVSVVRGQFTSQLRRHWGIEKTRDTYHHHAVDALIIAASSQLNLWKKQKNTLVSYSEDQLLDIETGELISDDEYKESVFKAPYQHFVDTLKSKEFEDSILFSYQVDSKFNRKISDATIYATRQAKVGKDKADETYVLGKIKDIYTQDGYDAFMKIYKKDKSKFLMYRHDPQTFEKVIEPILENYPNKQINEKGKEVPCNPFLKYKEEHGYIRKYSKKGNGPEIKSLKYYDSKLGNHIDITPKDSNNKVVLQSVSPWRADVYFNKTTGKYEILGLKYADLQFEKGTGTYKISQEKYNDIKKKEGVDSDSEFKFTLYKNDLLLVKDTETKEQQLFRFLSRTMPKQKHYVELKPYDKQKFEGGEALIKVLGNVANSGQCKKGLGKSNISIYKVRTDVLGNQHIIKNEGDKPKLDF

SEQ ID NO: 55 - protein, 1388 aa, Streptococcus thermophilus
MTKPYSIGLDIGTNSVGWAVTTDNYKVPSKKMKVLGNTSKKYIKKNLLGVLLFDSGITAEGRRLKRTARRRYTRRRNRILYLQEIFSTEMATLDDAFFQRLDDSFLVPDDKRDSKYPIFGNLVEEKAYHDEFPTIYHLRKYLADSTKKADLRLVYLALAHMIKYRGHFLIEGEFNSKNNDIQKNFQDFLDTYNAIFESDLSLENSKQLEEIVKDKISKLEKKDRILKLFPGEKNSGIFSEFLKLIVGNQADFRKCFNLDEKASLHFSKESYDEDLETLLGYIGDDYSDVFLKAKKLYDAILLSGFLTVTDNETEAPLSSAMIKRYNEHKEDLALLKEYIRNISLKTYNEVFKDDTKNGYAGYIDGKTNQEDFYVYLKKLLAEFEGADYFLEKIDREDFLRKQRTFDNGSIPYQIHLQEMRAILDKQAKFYPFLAKNKERIEKILTFRIPYYVGPLARGNSDFAWSIRKRNEKITPWNFEDVIDKESSAEAFINRMTSFDLYLPEEKVLPKHSLLYETFNVYNELTKVRFIAESMRDYQFLDSKQKKDIVRLYFKDKRKVTDKDIIEYLHAIYGYDGIELKGIEKQFNSSLSTYHDLLNIINDKEFLDDSSNEAIIEEIIHTLTIFEDREMIKQRLSKFENIFDKSVLKKLSRRHYTGWGKLSAKLINGIRDEKSGNTILDYLIDDGISNRNFMQLIHDDALSFKKKIQKAQIIGDEDKGNIKEVVKSLPGSPAIKKGILQSIKIVDELVKVMGGRKPESIVVEMARENQYTNQGKSNSQQRLKRLEKSLKELGSKILKENIPAKLSKIDNNALQNDRLYLYYLQNGKDMYTGDDLDIDRLSNYDIDHIIPQAFLKDNSIDNKVLVSSASNRGKSDDVPSLEVVKKRKTFWYQLLKSKLISQRKFDNLTKAERGGLSPEDKAGFIQRQLVETRQITKHVARLLDEKFNNKKDENNRAVRTVKIITLKSTLVSQFRKDFELYKVREINDFHHAHDAYLNAVVASALLKKYPKLEPEFVYGDYPKYNSFRERKSATEKVYFYSNIMNIFKKSISLADGRVIERPLIEVNEETGESVWNKESDLATVRRVLSYPQVNVVKKVEEQNHGLDRGKPKGLFNANLSSKPKPNSNENLVGAKEYLDPKKYGGYAGISNSFTVLVKGTIEKGAKKKITNVLEFQGISILDRINYRKDKLNFLLEKGYKDIELIIELPKYSLFELSDGSRRMLASILSTNNKRGEIHKGNQIFLSQKFVKLLYHAKRISNTINENHRKYVENHKKEFEELFYYILEFNENYVGAKKNGKLLNSAFQSWQNHSIDELCSSFIGPTGSERKGLFELTSRGSAADFEFLGVKIPRYRDYTPSSLLKDATLIHQSVTGLYETRIDLAKLGEG

SEQ ID NO: 56 - protein, 1138 aa, Acidothermus cellulolyticus
MGGSEVGTVPVTWRLGVDVGERSIGLAAVSYEEDKPKEILAAVSWIHDGGVGDERSGASRLALRGMARRARRLRRFRRARLRDLDMLLSELGWTPLPDKNVSPVDAWLARKRLAEEYVVDETERRRLLGYAVSHMARHRGWRNPWTTIKDLKNLPQPSDSWERTRESLEARYSVSLEPGTVGQWAGYLLQRAPGIRLNPTQQSAGRRAELSNATAFETRLRQEDVLWELRCIADVQGLPEDVVSNVIDAVFCQKRPSVPAERIGRDPLDPSQLRASRACLEFQEYRIVAAVANLRIRDGSGSRPLSLEERNAVIEALLAQTERSLTWSDIALEILKLPNESDLTSVPEEDGPSSLAYSQFAPFDETSARIAEFIAKNRRKIPTFAQWWQEQDRTSRSDLVAALADNSIAGEEEQELLVHLPDAELEALEGLALPSGRVAYSRLTLSGLTRVMRDDGVDVHNARKTCFGVDDNWRPPLPALHEATGHPVVDRNLAILRKFLSSATMRWGPPQSIVVELARGASESRERQAEEEAARRAHRKANDRIRAELRASGLSDPSPADLVRARLLELYDCHCMYCGAPISWENSELDHIVPRTDGGSNRHENLAITCGACNKEKGRRPFASWAETSNRVQLRDVIDRVQKLKYSGNMYWTRDEFSRYKKSVVARLKRRTSDPEVIQSIESTGYAAVALRDRLLSYGEKNGVAQVAVFRGGVTAEARRWLDISIERLFSRVAIFAQSTSTKRLDRRHHAVDAVVLTTLTPGVAKTLADARSRRVSAEFWRRPSDVNRHSTEEPQSPAYRQWKESCSGLGDLLISTAARDSIAVAAPLRLRPTGALHEETLRAFSEHTVGAAWKGAELRRIVEPEVYAAFLALTDPGGRFLKVSPSEDVLPADENRHIVLSDRVLGPRDRVKLFPDDRGSIRVRGGAAYIASFHHARVFRWGSSHSPSFALLRVSLADLAVAGLLRDGVDVFTAELPPWTPAWRYASIALVKAVESGDAKQVGWLVPGDELDFGPEGVTTAAGDLSMFLKYFPERHWVVTGFEDDKRINLKPAFLSAEQAEVLRTERSDRPDTLTEAGEILAQFFPRCWRATVAKVLCHPGLTVIRRTALGQPRWRRGHLPYSWRPWSADPWSGGTP

SEQ ID NO: 57 - protein, 1629 aa, Francisella novicida
MNFKILPIAIDLGVKNTGVFSAFYQKGTSLERLDNKNGKVYELSKDSYTLLMNNRTARRHQRRGIDRKQLVKRLFKLIWTEQLNLEWDKDTQQAISFLFNRRGFSFITDGYSPEYLNIVPEQVKAILMDIFDDYNGEDDLDSYLKLATEQESKISEIYNKLMQKILEFKLMKLCTDIKDDKVSTKTLKEITSYEFELLADYLANYSESLKTQKFSYTDKQGNLKELSYYHHDKYNIQEFLKRHATINDRILDTLLTDDLDIWNFNFEKFDFDKNEEKLQNQEDKDHIQAHLHHFVFAVNKIKSEMASGGRHRSQYFQEITNVLDENNHQEGYLKNFCENLHNKKYSNLSVKNLVNLIGNLSNLELKPLRKYFNDKIHAKADHWDEQKFTETYCHWILGEWRVGVKDQDKKDGAKYSYKDLCNELKQKVTKAGLVDFLLELDPCRTIPPYLDNNNRKPPKCQSLILNPKFLDNQYPNWQQYLQELKKLQSIQNYLDSFETDLKVLKSSKDQPYFVEYKSSNQQIASGQRDYKDLDARILQFIFDRVKASDELLLNEIYFQAKKLKQKASSELEKLESSKKLDEVIANSQLSQILKSQHTNGIFEQGTFLHLVCKYYKQRQRARDSRLYIMPEYRYDKKLHKYNNTGRFDDDNQLLTYCNHKPRQKRYQLLNDLAGVLQVSPNFLKDKIGSDDDLFISKWLVEHIRGFKKACEDSLKIQKDNRGLLNHKINIARNTKGKCEKEIFNLICKIEGSEDKKGNYKHGLAYELGVLLFGEPNEASKPEFDRKIKKFNSIYSFAQIQQIAFAERKGNANTCAVCSADNAHRMQQIKITEPVEDNKDKIILSAKAQRLPAIPTRIVDGAVKKMATILAKNIVDDNWQNIKQVLSAKHQLHIPIITESNAFEFEPALADVKGKSLKDRRKKALERISPENIFKDKNNRIKEFAKGISAYSGANLTDGDFDGAKEELDHIIPRSHKKYGTLNDEANLICVTRGDNKNKGNRIFCLRDLADNYKLKQFETTDDLEIEKKIADTIWDANKKDFKFGNYRSFINLTPQEQKAFRHALFLADENPIKQAVIRAINNRNRTFVNGTQRYFAEVLANNIYLRAKKENLNTDKISFDYFGIPTIGNGRGIAEIRQLYEKVDSDIQAYAKGDKPQASYSHLIDAMLAFCIAADEHRNDGSIGLEIDKNYSLYPLDKNTGEVFTKDIFSQIKITDNEFSDKKLVRKKAIEGFNTHRQMTRDGIYAENYLPILIHKELNEVRKGYTWKNSEEIKIFKGKKYDIQQLNNLVYCLKFVDKPISIDIQISTLEELRNILTTNNIAATAEYYYINLKTQKLHEYYIENYNTALGYKKYSKEMEFLRSLAYRSERVKIKSIDDVKQVLDKDSNFIIGKITLPFKKEWQRLYREWQNTTIKDDYEFLKSFFNVKSITKLHKKVRKDFSLPISTNEGKFLVKRKTWDNNFIYQILNDSDSRADGTKPFIPAFDISKNEIVEAIIDSFTSKNIFWLPKNIELQKVDNKNIFAIDTSKWFEVETPSDLRDIGIATIQYKIDNNSRPKVRVKLDYVIDDDSKINYFMNHSLLKSRYPDKVLEILKQSTIIEFESSGFNKTIKEMLGMKLAGIYNETSNN

SEQ ID NO: 58 - protein, 1068 aa, Verminephrobacter eiseniae
MNKAVAYRLALDLGSTSLGWAIFRLNEAREPTAIIRAGVRIFSDGRNANSEPLAVHRRVARAMRRRRDRLLKRKKRMHDQLVQHGFFPAEVAERKELERLNPYQLRAKGLHEALTPGEFARALFHINQRRGFKSNRKTDRKDNDSGALKQAISELRKRIQDSDCATAGEWFWKERMQQKPEGVRGQWVRARYRKTPSTTDEGKKRIGYDLYVDRAMVEQEFDALWAAQAALQPGLFTEAARAELKDTLLYQRDLRPVKPGRCTLLPAEERAPLALPSTQRFRILQEVNNLRLLDEALREVPLNLAQRDAVVSALEGKKELSFAAIRKLLTLSGKFNLEDEKRAELKGNATSVILARKDLFGDAWAGFDAAVQDEIVWRLVSQESEGALIAWLQQHTGVDGVCAEAIVNTRLPDGYGRLSRKALERIVPALQREVCTYDKAVQAAGFAHHSDLGFDFDYAEDEVQQVGEHTIASTGEVQAQYAFKQLPYYGKALQRHVAFGSGDAKDHEEKCYGKIANPTVHIGLNQVRTVVNALIRRYGHPTEVVVELARDLKQSREQKQQTQREQADNQKRNEDIRKRIAPILETSPERVRDRDIKKWILWEELNKKDIADRHCPYSGERISATMLLSEAVEIEHILPFSRTLDDSLNNRTVAMRRANRIKGDRTPWEARADFEAQGWRYEAILQRAEGMPPRKRYRFAEDGYQRWLGKDRNFLARALNDTSYLSRLAANYLRLVCPQGVRVIPGQMTDKLRGKFGLNSVLGLDGKKNRNDHRHHAVDACVIGVTDQGLMQRFANASKQARENGLTRLVQDMLLPWWPSYYDHVERAVRHIRVSHRPDHGFEGAMMKGTAHGIREDGIREDGRIKQRPKAKGSADHKTITLIPIDEPRQLARHGVDAEGKPLPYKGYASGSNYCIEITKNGKGKWEGQVISTFDAYRIKAAADAAARAGQVISTVEADSIVRKSGWERLRGAQSQNGQPLVMRLVIGDSVRMEVDGRDEVMRVVKMSGKEMVFAPVREANVDKRNNMPDEQDPFTYTYKRADQLRKAKARQVTISPIGELRDPGFKG

SEQ ID NO: 59 - protein, 1125 aa, Francisella tularensis
MNVKILPIAIDLDVKNTGVFSAFYQKGTSLEKLDNKNGKVYELSKDSYTLLMNNRTARRHQRRGIDRKQLVKRLFKLVWTEQLNLEWDKDTQQAISFLFNRRGFSFITDGYSTEYLNIVPEQVKAILMDIFDDYNGEDDLDSYLKLATEQESKISEIYNKLMQKILEFKLRKLCTDIKDDKVSTKTLKEITSYEFELLADYLANYSESLKIQKFSYTDKQGNLKELSYYHHDKYNIQEFLKRHATINDEILDTLLTDDFDIWNFNFEKFDFDKNEEKLQNQEDKDHTQAHLHHFVFAVNKIKSEMASGGRHRSQYFQEITNVLDENNHQEGYLKNFCENLHNKKYSNLSVKNLVNLVGNLSNLELKPLRKYFNDKIHAKADHWDEQKFTETYCHWILGEWRVGVKDQDKKDGAKYSYKDLCNELKQKVTKAGLIDFLLELDPCRTIPPYLDNNNRKPPKCQSLILNPKFLDNQYPNWQQYLQELKKLQSIQDYLDSFETDLKDLKSSKDQPYFVEYKSSNQQMASGQRDYKDLDARILQFIFDRVKASDELLLNEIYFQAKKLKQKASSELEKLESSKKLDEVIANSQLSQILKSQHTNGIFEQGTFLHLVCKYYKQRQRARDSRLYIMPEYRYDKKLDKYNNTGRFDDNNQLLTYCNHKPRQKRYQLLNDLAGVLQVSRNQLLSSVEEWFQQAQRVGEISKSQDEQIFEWLKSFKIASYCKAAVEMQKQYRGTLKNAIQTAIFRQSENINKNKNKNTGNQQQALSENSKDVKSLTADEKKLLKLIENIAKASQKIGESLGLNDKQIKKFNSIYSFAQIQQIAFAERKGNANTCAVCSADNAHRMQQIKITELVEDNKDNIILSAKAQRLPAIPTRIVDGAVKKMATILAKNIVDDNWQNIKQVLSAKHQLHIPIITESNAFEFEPALADVKGKSLKDRRKKALERISPENIFKDKNNRIKEFAKGISAYSGANLTDGDFDGAKEELDHIIPRSHKKYGTLNDEANLICVTRDDNKNIFAIDTSKWFEIETPSDLRDIGVATIQYKIDNNSRPKVRVKLDYVIDDDSKINYFMNHSLLKSRYPDKVLEILKQSTIIEFESSGFNKTIKEMLGMTLAGIYNETSNN

SEQ ID NO: 60 - protein, 1064 aa, Bradyrhizobium sp.
MKRTSLRAYRLGVDLGANSLGWFVVWLDDHGQPEGLGPGGVRIFPDGRNPQSKQSNAAGRRLARSARRRRDRYLQRRGKLMGLLVKHGLMPADEPARKRLECLDPYGLRAKALDEVLPLHHVGRALFHLNQRRGLFANRAIEQGDKDASAIKAAAGRLQTSMQACGARTLGEFLNRRHQLRATVRARSPVGGDVQARYEFYPTRAMVDAEFEAIWAAQAPHHPTMTAEAHDTIREAIFSQRAMKRPSIGKCSLDPATSQDDVDGFRCAWSHPLAQRFRIWQDVRNLAVVETGPTSSRLGKEDQDKVARALLQTDQLSFDEIRGLLGLPSDARFNLESDRRDHLKGDATGAILSARRHFGPAWHDRSLDRQIDIVALLESALDEAAIIASLGTTHSLDEAAAQRALSALLPDGYCRLGLRAIKRVLPLMEAGRTYAEAASAAGYDHALLPGGKLSPTGYLPYYGQWLQNDVVGSDDERDTNERRWGRLPNPTVHIGIGQLRRVVNELIRWHGPPAEITVELTRDLKLSPRRLAELEREQAENQRKNDKRTSLLRKLGLPASTHNLLKLRLWDEQGDVASECPYTGEAIGLERLVSDDVDIDHLIPFSISWDDSAANKVVCMRYANREKGNRTPFEAFGHRQGRPYDWADIAERAARLPRGKRWRFGPGARAQFEELGDFQARLLNETSWLARVAKQYLAAVTHPHRIHVLPGRLTALLRATWELNDLLPGSDDRAAKSRKDHRHHAIDALVAALTDQALLRRMANAHDDTRRKIEVLLPWPTFRIDLETRLKAMLVSHKPDHGLQARLHEDTAYGTVEHPETEDGANLVYRKTFVDISEKEIDRIRDRRLRDLVRAHVAGERQQGKTLKAAVLSFAQRRDIAGHPNGIRHVRLTKSIKPDYLVPIRDKAGRIYKSYNAGENAFVDILQAESGRWIARATTVFQANQANESHDAPAAQPIMRVFKGDMLRIDHAGAEKFVKIVRLSPSNNLLYLVEHHQAGVFQTRHDDPEDSFRWLFASFDKLREWNAELVRIDTLGQPWRRKRGLETGSEDATRIGWTRPKKWP

SEQ ID NO: 61 - protein, 1354 aa, Flavobacterium psychrophilum
MKKILGLDLGTNSIGWAFINEAENEIEVSSIVNTGVRIVPLTTDEESDFKKGNTISINADRTLKRGARRGLQRFKQRREALLETFNRIKFIATDFVYAETGAATTFSSYQLRAKSAVEAVTKEELVKVLLMLNKKRGYKSSRKAKTAEEGDAIDGMKIAKEIFENNLTPGQWVYNSLSKGGKFIPDFYHSDLQKELEKIVRFQNQFHSEQINDKLLADIQGKSRTQTSQHFSKTLNIPLAENKGTREETKLQHYQWRNEALANELDMKILAFIITEINNQINQSSGYLGAISDRSKELYFNQETVGQYQYKQLQENVHAKLKNQVFYRQDYLDEFEKIWETQAKFHSELNEKLKAEIRDITIFYQRKLKSQKHLVSFCEFEKGHKAIPKSSPLFQEFRIWQNLNNVVVKNETTKEVFELSEELKQLIAEELQFKESMTDVQMLTFCELKKGTHTVNFKKIEGNRTNTSIYKAFEKILEVEGYEIDFSKMKPLEIKETVAPIFETLNINTVILDFDPTIQGNDFDKQPYYQLWHLLYSAEDDDKLKETLKTKFGFKENHLPFILNINLQADYGSLSAKAIKKILPHLMDGHIYDKACLMVGYNHSSSLTTAQNNDRVLKDTLELLKKNSLRNPVVEKILNQMINVINAIMKDPAMGKPDEIRVELARELKANNEQRKKATSDINTATTEHERIRKLLHSEFNIPRVTRNDIIRYKLWLETGGISLYTGNPIKASDLFSKNYDIEHIIPKSRLFDDSFSNKTLCERQLNIDKSNKTAYSFLQEKLSENDFAAYENRVKDLFKTGKIKSYTKYKKLLMADNEIPEGFIDRQLRETQYIAKKAKEILLEVSRNVTATIGSVTDKLRQDWELVDVMKELNWEKYDKLGLTHIEEGKNGERLSKIKDWTKRNDHRHHAMDAITVAFTKPAYIQYLNNLNAKTQGENKANSIIGIENKHLYRDKNNKLRFISPMKNFREEAKKQLESILISYKAKNKVVTKNKNTTKKSGGTNQKIQLTPRGRLHKETVYGKLQQYATKEEKVNASFTEDYIQKVAKKEYREALLKRLEENDNDPKKAFTGKNALNKTPIYISLKDNIIVPEKVKTVWLETDYTIRKDITPDLKIDKVIDVGIKRILQNRLNEFNGDPKKAFVNLGESPIWLNKEKGIAIKRVTISGVSNAQALHTKKDHLGNEILDKNGNPIPVDFISTGNNHHVAIYRDEKGNLQEEVVSFYDAVIRRNLGLSVINKNHEKGWEFLFSMKQNEFFIFPSDGFNPHEIDLLNPNNYHLISPNIFRVQKISTKNYMFNHHLETKAVDGEMLKSKKELSKTSYHFIQTPTNLNGIIKVRINHLGKIVHLGEY

SEQ ID NO: 62 - protein, 1062 aa, Actinobacillus succinogenes
MNLNYILGLDLGIASVGWAVVEIDEQENPQRLIDVGVRTFDRAEVLKTGESLALARRLARSSRRLVKRRAERIKKAKRLLKAENLLLSADEILPNEAWQLRVKGLDQKLERQEWAAVLLHLLKHRGYLSQRKNESKSENKELGALLSGVAINHQILQSAEYRTPAEIAVNKFQAEEGHIRNQRGAYTHTFSRLDLLAEMELLFQRQATLGNPHTSTKLLENLTALLMWQKPALAGEAILKMLGKCTFEPTEYKAAKNSYSAERFVWLTKLNNLRILEQGAERALTDNERFALLDQPYEKAKLTYAQVRTLLGLSDEAIFKGLRYQGEDKKAVETKTTLMEVKAYHQIRKALEGLDLKAEWNELKNNPALLDEIGTAFSLYKTDDDIHRYLDGKLSESVLNALLENLNFDKFIQLSLKALQQILPLMLQGQRYDEAVSAIYGDHYGKKSDEIDRLLPNIPTDEIRNPVVLRTLTQARKVINAVVRLYGSPARIHIETGREVGKSYQDRKKLEKQQEENRKQRENAVKKFKEYFPNFVGEPKGKDILKMRLYELQQAKCLYSGKSLELYRLLEKGYVEVDHALPFSRTWDDSFNNKVLVLANENQNKGNATPYEWLDGKNNSEGWQHFVARVQTSGFSYAKKQRVLIQELDEKSFIERNLNDTRYVARFLCNHIADNMLLTGKGKRKVFASNGQITALLRGCWGLQKVRENNDRHHALDAVVVACSTKSMQDKITKFVKYKEGRLFKDKKDGVYKGERINRETGEIISLHFPTPWKFFKENVEIRIFSENPKLELENRLPDYPQYNHEFVQPLFVSRMPTRKMTGQGHMETVKSAKRLDKGLSVLKVPLTQLKLSDLERMVNREREMALYEALKECLEQFGNDPAKAFAEPFYKKGGALVKAVRVEQTQKSGVLVRNGNGVADNATGSIVRVDVFTKGGKYFLVPIYTWQVAKGILPNKAVIQGKDESEWEEMDENAVFQFSMHKNDLIKVKTKKGEIFGYFNGLDRATGSIEIEEHDLEKSKGKNGSHRGLGVKTAFFLEKYQVDELGKNIRPCRPTKRQHVR

SEQ ID NO: 63 - protein, 1340 aa, Dorea longicatena
MEQEYYLGLDMGTGSVGWAVTDSEYHVLRKHGKALWGVRLFESASTAEERRMFRTSRRRLDRRNWRIEILQEIFAEEISKKDPGFFLRMKESKYYPEDKRDINGNCPELPYALFVDDDFTDKDYHKKFPTIYHLRKMLMNTEETPDIRLVYLAIHHMMKHRGHFLLSGDINEIKEFGTTFSKLLENIKNEELDWNLELGKEEYAVVESILKDNMLNRSTKKTRLIKALKAKSICEKAVLNLLAGGTVKLSDIFGLEELNETERPKISFADNGYDDYIGEVENELGEQFYIIETAKAVYDWAVLVEILGKYTSISEAKVATYEKHKSDLQFLKKIVRKYLTKEEYKDIFVSTSDKLKNYSAYIGMTKINGKKVDLQSKRCSKEEFYDFIKKNVLKKLEGQPEYEYLKEELERETFLPKQVNRDNGVIPYQIHLYELKKILGNLRDKIDLIKENEDKLVQLFEFRIPYYVGPLNKIDDGKEGKFTWAVRKSNEKIYPWNFENVVDIEASAEKFIRRMTNKCTYLMGEDVLPKDSLLYSKYMVLNELNNVKLDGEKLSVELKQRLYTDVFCKYRKVTVKKIKNYLKCEGIISGNVEITGIDGDFKASLTAYHDFKEILTGTELAKKDKENIITNIVLFGDDKKLLKKRLNRLYPQITPNQLKKICALSYTGWGRFSKKFLEEITAPDPETGEVWNIITALWESNNNLMQLLSNEYRFMEEVETYNMGKQTKTLSYETVENMYVSPSVKRQIWQTLKIVKELEKVMKESPKRVFIEMAREKQESKRTESRKKQLIDLYKACKNEEKDWVKELGDQEEQKLRSDKLYLYYTQKGRCMYSGEVIELKDLWDNTKYDIDHIYPQSKTMDDSLNNRVLVKKKYNATKSDKYPLNENIRHERKGFWKSLLDGGFISKEKYERLIRNTELSPEELAGFIERQIVETRQSTKAVAEILKQVFPESEIVYVKAGTVSRFRKDFELLKVREVNDLHHAKDAYLNIVVGNSYYVKFTKNASWFIKENPGRTYNLKKMFTSGWNIERNGEVAWEVGKKGTIVTVKQIMNKNNILVTRQVHEAKGGLFDQQIMKKGKGQIAIKETDERLASIEKYGGYNKAAGAYFMLVESKDKKGKTIRTIEFIPLYLKNKIESDESIALNFLEKGRGLKEPKILLKKIKIDTLFDVDGFKMWLSGRTGDRLLFKCANQLILDEKIIVTMKKIVKFIQRRQENRELKLSDKDGIDNEVLMEIYNTFVDKLENTVYRIRLSEQAKTLIDKQKEFERLSLEDKSSTLFEILHIFQCQSSAANLKMIGGPGKAGILVMNNNISKCNKISIINQSPTGIFENEIDLLKI

SEQ ID NO: 64 - protein, 984 aa, Campylobacter jejuni
MAKILAFDIGISSIGWAFSENDELKDCGVRIFTKAENPKTGESLALPRRIARSARKRLARRKARLNHLKHLIANEFKLNYEDYQSFDEILAKAYKGSLISPYELRFRALNELLSKQDFARVILHIAKRRGYDDIKNNGDEEKGKILKAIKQNEEKLANYQSVGEYLYKEYFQKFKENSKEFINVRNKKESYERCIAQSFLKDELKLIFKKQREFGFSFSKKFEEEVLSVAFYKRALKDFSHLVGNCSFFTDEKRAPKNSPLAFMFVALTRIINLLNNLKNTLYTKDDLNALLNEVLKNGTLTYKQTKKLLGLSDDYEFKGEKGNYFIEFKKYKEFIKALGEHSLSQDDLNEIAKDITLIKDEIKLKKALAKYDLNENQIDNLSKLEFKDHLNISFKALKLITPLMLEGKKYDEACNELTLKVAINEDKKDFLPAFNETYYKDEVTNPVVLRAIKEYRKVLNALLKKYGKVHKINIELAREVGKNHSQRAKIEKEQNENYKAKKDAELECEKLGLKINSKNILKLRLFKEQKEFCVYSGEKIKLSDLQDEKMLEIDHIYPYSRSFDDSYMNKVLVFTKQNQEKLNQTPFEAFGNDSAKWQKIEVLAKNLPTKKQKRILDKNYKDKEQKDFKDRNLNDTRYIARLVLNYTKDYLDFLPLSDDENTKLNDTQKGSKVHVEAKSGMLTSALRHTWGFSTKDRNNHLHHAIDAVIIAYANNSIVKAFSDFKKEQESNTAELYAKKISELDYKNKRKFFEPFSGFRQKVLDKIDEIFVSKPERKKPSGALHEETFRKEEEFYQSYGGKEGVLKALELGKIRKVNGKIVKNGDMFRVDIFKHKKTNKFYAVPIYTMDFALKVLPNKAVARSKKGEIKDWILMDENYEFCFSLYKDSLILIQTKDMQEPEFVYYNAFTSSTVSLIVSKHDNKFETLSKNQKILFKNANEKEVIAKSIGIQNLKVFEKYIVSALGEVTKAEFRQREEFKNELR

SEQ ID NO: 65 - protein, 1037 aa, Parvibaculum lavamentivorans
MERIFGFDIGTTSIGFSVIDYSSTQSAGNIQRLGVRIFPEARDPDGTPLNQQRRQKRMMRRQLRRRRIRRKALNETLHEAGFLPAYGSADWPVVMADEPYELRRRGLEEGLSAYEFGRAIYHLAQHRHFKGRELEESDTPDPDVDDEKEAANERAATLKALKNEQTTLGAWLARRPPSDRKRGIHAHRNVVAEEFERLWEVQSKFHPALKSEEMRARISDTIFAQRPVFWRKNTLGECRFMPGEPLCPKGSWLSQQRRMLEKLNNLAIAGGNARPLDAEERDAILSKLQQQASMSWPGVRSALKALYKQRGEPGAEKSLKFNLELGGESKLLGNALEAKLADMFGPDWPAHPRKQEIRHAVHERLWAADYGETPDKKRVIILSEKDRKAHREAAANSFVADFGITGEQAAQLQALKLPTGWEPYSIPALNLFLAELEKGERFGALVNGPDWEGWRRTNFPHRNQPTGEILDKLPSPASKEERERISQLRNPTVVRTQNELRKVVNNLIGLYGKPDRIRIEVGRDVGKSKREREEIQSGIRRNEKQRKKATEDLIKNGIANPSRDDVEKWILWKEGQERCPYTGDQIGFNALFREGRYEVEHIWPRSRSFDNSPRNKTLCRKDVNIEKGNRMPFEAFGHDEDRWSAIQIRLQGMVSAKGGTGMSPGKVKRFLAKTMPEDFAARQLNDTRYAAKQILAQLKRLWPDMGPEAPVKVEAVTGQVTAQLRKLWTLNNILADDGEKTRADHRHHAIDALTVACTHPGMTNKLSRYWQLRDDPRAEKPALTPPWDTIRADAEKAVSEIVVSHRVRKKVSGPLHKETTYGDTGTDIKTKSGTYRQFVTRKKIESLSKGELDEIRDPRIKEIVAAHVAGRGGDPKKAFPPYPCVSPGGPEIRKVRLTSKQQLNLMAQTGNGYADLGSNHHIAIYRLPDGKADFEIVSLFDASRRLAQRNPIVQRTRADGASFVMSLAAGEAIMIPEGSKKGIWIVQGVWASGQVVLERDTDADHSTTTRPMPNPILKDDAKKVSIDPIGRVRPSND

SEQ ID NO: 66 - protein, 1107 aa, Eubacterium ventriosum
MGYTVGLDIGVASVGVAVLDENDNIVEAVSNIFDEADTSNNKVRRTLREGRRTKRRQKTRIEDFKQLWETSGYIIPHKLHLNIIELRNKGLTELLSLDELYCVLLSMLKHRGISYLEDADDGEKGNAYKKGLAFNEKQLKEKMPCEIQLERMKKYGKYHGEFIIEINDEKEYQSNVFTTKAYKKELEKIFETQRCNGNKINTKFIKKYMEIYERKREYYIGPGNEKSRTDYGIYTTRTDEEGNFIDEKNIFGKLIGKCSVYPEEYRASSASYTAQEFNLLNDLNNLKINNEKLTEFQKKEIVEIIKDASSVNMRKIIKKVIDEDIEQYSGARIDKKGKEIYHTFEIYRKLKKELKTINVDIDSFTREELDKTMDILTLNTERESIVKAFDEQKFVYEENLIKKLIEFRKNNQRLFSGWHSFSYKAMLQLIPVMYKEPKEQMQLLTEMNVFKSKKEKYVNYKYIPENEVVKEIYNPVVVKSIRTTVKILNALIKKYGYPESVVIEMPRDKNSDDEKEKIDMNQKKNQEEYEKILNKIYDEKGIEITNKDYKKQKKLVLKLKLWNEQEGLCLYSGKKIAIEDLLNHPEFFEIDHIIPKSISLDDSRSNKVLVYKTENSIKENDTPYHYLTRINGKWGFDEYKANVLELRRRGKIDDKKVNNLLCMEDITKIDVVKGFINRNLNDTRYASRVVLNEMQSFFESRKYCNTKVKVIRGSLTYQMRQDLHLKKNREESYSHHAVDAMLIAFSQKGYEAYRKIQKDCYDFETGEILDKEKWNKYIDDDEFDDILYKERMNEIRKKIIEAEEKVKYNYKIDKKCNRGLCNQTIYGTREKDGKIHKISSYNIYDDKECNSLKKMINSGKGSDLLMYNNDPKTYRDMLKILETYSSEKNPFVAYNKETGDYFRKYSKNHNGPKVEKVKYYSGQINSCIDISHKYGHAKNSKKVVLVSLNPYRTDVYYDNDTGKYYLVGVKYNHIKCVGNKYVIDSETYNELLRKEGVLNSDENLEDLNSKNITYKFSLYKNDIIQYEKGGEYYTERFLSRIKEQKNLIETKPINKPNFQRKNKKGEWENTRNQIALAKTKYVGKLVTDVLGNCYIVNMEKFSLVVDK

SEQ ID NO: 67 - protein, 1136 aa, Streptococcus gordonii
MNGLVLGLDIGIASVGVGILEKDTGKIIHASSRLFPAATADNNVERRSNRQGRRLNRRKKHRSVRLQDLFEGYGLLTDFSKVSMNLNPYQLRVQGMENQLTNEELFVALKNIVKRRGISYLDDASEDGGTVSSDYGKAVEENRKLLAEKTPGQIQLERFEKYGQLRGDFTVEENGEKHRLINVFSTSAYRKEAERILRKQQEFNSKITDEFIEDYLIILTGKRKYYHGPGNEKSRTDYGRFRTDGTTLDNIFGILIGKCTFYTEEYRASKASYTAQEFNLLNDLNNLTVPTETKKLSEEQKKLIIEYAKSAKTLGASTLLKYIAKMIDASVDQIRGYRVDVNNKPEMHTFEVYRKMQSLETIKVEELPRKVLDELAHILTLNTEREGIEEAINSKLKDIFNRDQVLELVQFRKNNSSLFSKGWHNFSIKLMMELIPELYETSEEQMTILTRLGKQRSKETSKRTKYIDEKELTEEIYNPVVAKSVRQAIKIINEATKKYGIFDNIVIEMARENNEEDAKKDYIKRQKANQDEKNAAMEKAAFQYNGKKELPDNIFHGHKELTTKIRLWHQQGEKCLYTGKNIPISDLIHNQYKYEIDHILPLSLSFDDSLSNKVLVLATANQEKGQRTPFQALDSMDDAWSYREFKSYVKDSKLLSNKKKDYLLTEEDISKIEVKQKFIERNLVDTRYSSRVVLNALQDFYKSHQLDTTISVVRGQFTSQLRRKWGIEKSRETYHHHAVDALIIAASSQLRLWKKHSNPLIAYKEGQFVDSETGEIVSLSDEEYKELVFKAPYDHFVDTLRSKKFEDSILFSYQVDSKYNRKISDATIYATRKAKLDKEKKEYTYTLGKIKDIYALGTKTPSKTGFYKFLDLYKTDKSQFLMYQKDRKTWDEVIEKIIEQYRPFKEYDKNGKEVDFNPFEKYRIGNGPIRKYSKKGNGPEIKSLKYYDILLGKHKNITPDGSRNTVALLSLNPWRTDVYYNSETKKYEFLGLKYADLCFEEGGAYGISEVKYKKIREKEGIGKNSEFKFTLYKNDLILIKDTETNCQQFFRFWSRTGKDNPKSFEKHKIELKPYEKAKFEKGEELKVLGKVPPSSNQFQKNMQIENLSIYKVKTDILGNKHFIKKEGDEPKLKFKK

SEQ ID NO: 68 - protein, 984 aa, Campylobacter jejuni
MARILAFDIGISSIGWAFSENDELKDCGVRIFTKAENPKTGESLALPRRLARSARKRLARRKARLNHLKHLIANEFKLNYEDYQSFDESLAKAYKGSLISPYELRFRALNELLSKQDFARVILHIAKRRGYDDIKNNGDEEKSEILKAIKQNEEKLVNYQSVGEYLYKEYFQKFKENSKEFINVRNKKESYERCITQSFLKDELKLIFQKQREFGFSFSKKFEEEVLSVAFYKRALKDFSHLVGNCSFFTDEKRAPKNSPLAFMFVALTRIINILNNLKNTEGILYTKDDLNALLNEVLKNGTLTYKQTKKLLGLSDDYEFKGEKGTYFIEFKKYKEFIKALGEHNLSQDDLNEIAKDITLIKDEIKLKKALAKYDLNQNQIDSLSKLEFKDHLNISFKALKLITPLMLEGKKYDEACNELNLKVAINEDKKDFLPAFNETYYKDEVTNPVVLRAIKEYRKILNALLKKYGKVHKINIELAREVGKNHSQRAKIEKEQNENYKAKKDAEIECEKLGLKINSKNILKLRLFKEQKEFCAYSGEKIKLSDLQDEKMLEIDHIYPYSRSFDDSYMNKVLVFTKQNQEKLNKTPFEAFGNDSTKWQKIEVLAKNLPEKKQKRILDKNYKDKEQKDFKDRNLNDTRYIARLVLNYTKDYLDFLPLSDDENTKLNDTQKGSKVHVEAKSGMLTSALRHTWGFSAKDRNNHLHHAIDAAIIAYANNSIVKAFSDFKKEQESNSVELYAKKISELDYKNKRKFFEPFSGFRQKVLDKIDEIFVSKPERKKPSGALHEETFRKEEEFYQSYGGKEGVLKALELGKIRKVNGKIVKNGDMFRVDIFKHKKTNKFYAVPIYTMDFALKVLPNKAVARSKKGEIKDWILMDENYEFCFSLYKDSLILIQTKDMQEPELVYFNAFTSSTVSLIVSKHDNKFETLSKNQKILFKNANEKEVIAKSIGIQNLKVFEKYIVSALGEVTKAEFRQREDFKK

SEQ ID NO: 69 - protein, 1079 aa, Dinoroseobacter shibae
MRLGLDIGTSSIGWWLYETDGAGSDARITGVVDGGVRIFSDGRDPKSGASLAVDRRAARAMRRRRDRYLRRRATLMKVLAETGLMPADPAEAKALEALDPFALRAAGLDEPLPLPHLGRALFHLNQRRGFKSNRKTDRGDNESGKIKDATARLDMEMMANGARTYGEFLHKRRQKATDPRHVPSVRTRLSIANRGGPDGKEEAGYDFYPDRRHLEEEFHKLWAAQGAHHPELTETLRDLLFEKIFFQRPLKEPEVGLCLFSGHHGVPPKDPRLPKAHPLTQRRVLYETVNQLRVTADGREARPLTREERDQVIHALDNKKPTKSLSSMVLKLPALAKVLKLRDGERFTLETGVRDAIACDPLRASPAHPDRFGPRWSILDADAQWEVISRIRRVQSDAEHAALVDWLTEAHGLDRAHAEATAHAPLPDGYGRLGLTATTRILYQLTADVVTYADAVKACGWHHSDGRTGECFDRLPYYGEVLERHVIPGSYHPDDDDITRFGRITNPTVHIGLNQLRRLVNRIIETHGKPHQIVVELARDLKKSEEQKRADIKRIRDTTEAAKKRSEKLEELEIEDNGRNRMLLRLWEDLNPDDAMRRFCPYTGTRISAAMIFDGSCDVDHILPYSRTLDDSFPNRTLCLREANRQKRNQTPWQAWGDTPHWHAIAANLKNLPENKRWRFAPDAMTRFEGENGFLDRALKDTQYLARISRSYLDTLFTKGGHVWVVPGRFTEMLRRHWGLNSLLSDAGRGAVKAKNRTDHRHHAIDAAVIAATDPGLLNRISRAAGQGEAAGQSAELIARDTPPPWEGFRDDLRVRLDRIIVSHRADHGRIDHAARKQGRDSTAGQLHQETAYSIVDDIHVASRTDLLSLKPAQLLDEPGRSGQVRDPQLRKALRVATGGKTGKDFENALRYFASKPGPYQAIRRVRIIKPLQAQARVPVPAQDPIKAYQGGSNHLFEIWRLPDGEIEAQVITSFEAHTLEGEKRPHPAAKRLLRVHKGDMVALERDGRRVVGHVQKMDIANGLFIVPHNEANADTRNNDKSDPFKWIQIGARPAIASGIRRVSVDEIGRLRDGGTRPI

SEQ ID NO: 70 - protein, 1096 aa, Eubacterium dolichum
MMEVFMGRLVLGLDIGITSVGFGIIDLDESEIVDYGVRLFKEGTAAENETRRTKRGGRRLKRRRVTRREDMLHLLKQAGIISTSFHPLNNPYDVRVKGLNERLNGEELATALLHLCKHRGSSVETIEDDEAKAKEAGETKKVLSMNDQLLKSGKYVCEIQKERLRTNGHIRGHENNFKTRAYVDEAFQILSHQDLSNELKSAIITIISRKRMYYDGPGGPLSPTPYGRYTYFGQKEPIDLIEKMRGKCSLFPNEPRAPKLAYSAELFNLLNDLNNLSIEGEKLTSEQKAMILKIVHEKGKITPKQLAKEVGVSLEQIRGFRIDTKGSPLLSELTGYKMIREVLEKSNDEHLEDHVFYDEIAEILTKTKDIEGRKKQISELSSDLNEESVHQLAGLTKFTAYHSLSFKALRLINEEMLKTELNQMQSITLFGLKQNNELSVKGMKNIQADDTAILSPVAKRAQRETFKVVNRLREIYGEFDSIVVEMAREKNSEEQRKAIRERQKFFEMRNKQVADIIGDDRKINAKLREKLVLYQEQDGKTAYSLEPIDLKLLIDDPNAYEVDHIIPISISLDDSITNKVLVTHRENQEKGNLTPISAFVKGRFTKGSLAQYKAYCLKLKEKNIKTNKGYRKKVEQYLLNENDIYKYDIQKEFINRNLVDTSYASRVVLNTLTTYFKQNEIPTKVFTVKGSLTNAFRRKINLKKDRDEDYGHHAIDALIIASMPKMRLLSTIFSRYKIEDIYDESTGEVFSSGDDSMYYDDRYFAFIASLKAIKVRKFSHKIDTKPNRSVADETIYSTRVIDGKEKVVKKYKDIYDPKFTALAEDILNNAYQEKYLMALHDPQTFDQIVKVVNYYFEEMSKSEKYFTKDKKGRIKISGMNPLSLYRDEHGMLKKYSKKGDGPAITQMKYFDGVLGNHIDISAHYQVRDKKVVLQQISPYRTDFYYSKENGYKFVTIRYKDVRWSEKKKKYVIDQQDYAMKKAEKKIDDTYEFQFSMHRDELIGITKAEGEALIYPDETWHNFNFFFHAGETPEILKFTATNNDKSNKIEVKPIHCYCKMRLMPTISKKIVRIDKYATDVVGNLYKVKKNTLKFEFD

SEQ ID NO: 71 - protein, 1082 aa, Neisseria meningitidis
MAAFKPNPINYILGLDIGIASVGWAMVEIDEDENPICLIDLGVRVFERAEVPKTGDSLAMARRLARSVRRLTRRRAHRLLRARRLLKREGVLQAADFDENGLIKSLPNTPWQLRAAALDRKLTPLEWSAVLLHLIKHRGYLSQRKNEGETADKELGALLKGVADNAHALQTGDFRTPAELALNKFEKESGHIRNQRGDYSHTFSRKDLQAELNLLFEKQKEFGNPHISDGLKEGIETLLMTQRPALSGDAVQKMLGHCTFEPAEPKAAKNTYTAERFIWLTKLNNLRILEQGSERPLTDTERTTLIDEPYRKSKLTYAQARKLLELDNTAFFKGLRYGKDNAEASTLMEMKAYHAISRALEKEGLKDKKSPLNLSPELQDEIGTAFSLFKTDEDITGRLKDRVQPEILEALLKHISFDKFVQISLKALRRIVPLMEQGKRYDEACAEIYGDHYGKKNTEEKIDLPPIPADEIRNPVVLRALSQARKVINGVVRRYGSPARIHIETAREVGKSFKDRKEIEKRQEENRKDREKAATKFREYFPNFVGEPKSKDILKLRLYEQQHGKCLYSGKEINLGRLNEKGYVEIDHALPFSRTWDDSFNNKVLVLGSENQNKGNQTPYEYFNGKDNSREWQEFKARVETSRFPRSKKQRILLQKFDEEGFKERNLNDTRYVNRFLCQFVADHMLLTGKGKRRVFASNGQITNLLRGFWGLRKVRAENDRHHALDAVVVACSTVAMQQKITRFVRYKEMNAFDGKTIDKETGEVLHQKTHFPQPWEFFAQEVMIRVFGKPDGKPEFEEADTPEKLRTLLAEKLSSRPEAVHEYVTPLFVSRAPNRKMSGQGHMETVKSAKRLDEGVSVLRVPLTQLKLKDLEKMVNREREPKLYEALKARLEAHKDDPAKAFAEPFYKYDKAGNRTQQVKAVRVEQVQKTGVWVRNHNGIADNATMVRVDVFEKGDKYYLVPIYSWQVAKGILPDRAVVQGKDEEDWQLIDDSFNFKFSLHPNDLVEVITKKARMFGYFASCHRGTGNINIRIHDLDHKIGKNGILEGIGVKTALSFQKYQIDELGKEIRPCRLKKRPPVR

SEQ ID NO: 72 - protein, 1050 aa, Gluconacetobacter diazotrophicus
MGENMIDESLTFGIDLGIGSCGWAVLRRPSAFGRKGVIEGMGSWCFDVPETSKERTPTNQIRRSNRLLRRVIRRRRNRMAAIRRLLHAAGLLPSTDSDALKRPGHDPWELRARGLDKPLKPVEFAVVLGHIAKRRGFKSAAKRKATNISSDDKKMLTALEATRERLGRYRTVGEMFARDPDFASRRRNREGKYDRTTARDDLEHEVHALFAAQRRLGQGFASPELEEAFTASAFHQRPMQDSERLVGFCPFERTEKRAAKLTPSFERFRLLARLLNLRITTPDGERPLTVDEIALVTRDLGKTAKLSIKRVRTLIGLEDNQRFTTIRPEDEDRDIVARTGGAMTGTATLRKALGEALWTDMQERPEQLDAIVQVLSFFEANETITEKLREIGLTLAVLDVLLTALDAGVFAKFKGAAHISTKAARNLLPHLEQGRRYDEACTMAGYDHAASRLSHHGQIVAKTQFNALVTEIGESIANPIARKALIEGLKQIWAMRNHWGLPGSIHVELARDVGNSIEKRREIEKHIEKNTALRARERREVHDLLDLEDVNGDTLLRYRLWKEQGGKCLYTGKAIHIRQIAATDNSVQVDHILPWSRFGDDSFNNKTLCLASANQQKKRSTPYEWLSGQTGDAWNAFVQRIETNKELRGFKKRNYLLKNAKEAEEKFRSRNLNDTRYAARLFAEAVKLLYAFGERQEKGGNRRVFTRPGALTAALRQAWGVESLKKQDGKRINDDRHHALDALTVAAVDEAEIQRLTKSFHEWEQQGLGRPLRRVEPPWESFRADVEATYPEVFVARPERRRARGEGHAATIRQVKERECTPIVFERKAVSSLKEADLERIKDGERNEAIVEAIRSWIATGRPADAPPRSPRGDIITKIRLATTIKAAVPVRGGTAGRGEMVRADVFSKPNRRGKDEWYLVPVYPHQIMNRKAWPKPPMRSIVANKDEDEWTEVGPEHQFRFSLYPRSNIEIIRPSGEVIEGYFVGLHRNTGALTISAHNDPKSIHSGIGTKTLLAISKYQVDRFGRKSPVRKEVRTWHGEACISPTPPG

SEQ ID NO: 73 - protein, 1391 aa, Kordia algicida
MKKILGLDLGTNSIGWALVNEAEHEHEQSSIVKLGVRVNPLSVDEKTNFEKGRPLSINADRTSKRSARRNLQRFKLRRKNLINLLLKHHIISNETILTEVGKNTTHQTLKLRSKATQEKISLEEFARILLSINKKRGYKSSRKEKNEDEGFTIDGMAIAKELYDNQLTPGQYVYNILQDGKNYIPDFYRSDLQAEFDDVWQFQKKFYSSILTDEFYLKLKGQGKENTRKLFLAIHQVYTAENKGKRDAVKLQYYKWRSEAVKKQLSIEEVAYVLVEINNNINKSSGYLGAISDRSKALYFNNETVGEYLYGQLVKNRHNSLRNQVFYRQDYLDEFEKIWETQAKFYDELTNELKQEIRDVVIFYQRKLKSQKHLISDCLFEKHHKAIPKSSPLFQEFKIWQNLNYLEFVHTQSKEKIFFSELDDETRQFVFAELNIRGTLKIKEIKKLIGLETPVYWKSNFDEIEGNRTNQVLYNVYQNIADDLGYGFDWSKKHAFEINAELQAIFKDVGIDTAILNFDASIEENDFDKQKSYQLWHLLYSAEDTDKATEEDKLIYGNINTKLKKQLHQKYGFEAKYGNLLANISLQQDYGNLSAKAIKKILPYLESGNSFYEACTIVGYNPSNSLTKEQQQNRKLKDKLELLPKNSLRNPVVEKILNQKVNLINQLIDEYGKPDEVRIELARELKKSAKQRADLSKHINDATLKNQNIRKTLQKDFGIQNPSKNDVIRYKLYDELKDNGYKTLFTNKYIPKEQLFSKDVDIEHIIPKAILFDDSFSNKTLAYRNVNLAKADATAFDFISSKHLDDLDNYKARVETLFQSKRISKGKYKKLLMTRQNLPEDFIERDLRNSQYIAKKATAMLKEVFRSVVPTSGRITDKLREDWDLVNVMKELNLPKYRTLGLTEFIERKNGNKIEQIIDWTKRNDHRHHAMDALTVAFTTHNHIQYLNNLNVTHGLNGVDTDHEKSRLYAIKQAITKVYIVGKTKKRKFIPPMENFRSHAKNHLEGILISFKNKNKVVTKNKNRTKTKTKGVFNEKIQLTPRGQLHKETIYGHAKKVIVTKEKVSSKFTHEKILQVTKPAYREALLKRLASFKNDPKKAFSGKNALSKNPLYFDITSGKKVPDTVKLSYFENSYVIRKEVNSDNFKNEKSLQKVLDVGIRRILEKRLADYNGNAKEAFSNLEKNPIWKDKEKGVCIKKVRIEALKNAEPLHVKKDHLGKIILDDENKSTPVDFISTGNNHHVAIYEDKDGKLHDKVVSFYEVVSRVNLGLPIIDKSFNSHLDWKFLFSMKQNEMFVFPSEDFNPKEIDIGNPKNNELISKYLFRVQKFSKVTYGNSAVRDYVFRHHLETELIDKKELKGITYYQLKSIGMLEKLVKVRINHIGKIVHIGEY

SEQ ID NO: 74 - protein, 1116 aa, Clostridium spiroforme
MVEFLLKEMKIMGRLVLGLDIGITSVGYGVIDIDKNEFVDYGVRLFKEGTAINNEERRSKRGARRLKRRKTNRIADMKKLLERNGLIDEQYTALNNPYEIRKKGLKNKLSNYELATAILHITKNRGTCLESNADETQDEESTKNILSKNALELKDKYICEIQLARLEESGKIRGINNNFKTEDYLKELSKILENQDLEKETIDKIKEIVARRRRYDQGPGSEKSPTPYGSYRMENGELVHVNLIDMMRGKCSVFPDQLRAPQQSYSAELFNLLNDLNNLKINGEKLSSTEKQKIIDFVNEKGGITVKQLLKLIDVGITEISGFRIDKNEKPLITEFKGYKKVLKVFKNYNQESLLNDKSIVDTIMDINTKIKSIDERSDQLKQVLPSLDTSIINDLASIKGVSGYHSLSLKALNLINNEMLKTEMNQMQVLHQLDIFDKNRVSLKGQRQIYADDNAILSPVAKRAHRETFKVINKLRSIYGEFDSIVIETTRDKNTQDQKKRIKNNQKNYEERNTEVNNFLKEAGYNPENINAKTKMKIRLYIEQDAKSAYTLQDINLKELIEDEKAYEIDHIIPISISLDDSFNNKVLTTHDENQEKGNLTPISAFLKGKFHNGNLNTYKVFIQNNKNLNRKKKEYLLCEDDITRYEVVQNFINRNLVDTSYACRTVMNTLVHYFKDNEINTKVHTIKGQATSTFRKRIGLIKDREEDYFHHAIDALIVASLKKMNLINSYLMKVDFNEMYDEETGEIFNVLPDNSYLDEKYISFVSNLKNIYEESNKYIRGVMIKEKMTYPLIKVSHKIDTKPNRKISDDTIYSTRNVDNQDMLVERIKNIYDPKENAANTLINDIINDNTDKYIMYHKDPQTFDKIKAIVLNHFNEFKTDKNCYIVTKEGLYKLKGTSPLALYYEEFGPITKYAKKNNGPTIHSMKFYSEKLGNHLSITHKYSTVNKKVITKQISPYRTDFYQSPEGKYKFVTVRYKDVAYNAKKDKYIIDHSWYREQKKLKKIADEWIFVCSVHRDELIGIMKADGQKRIFDSSTESDGETLYHDAKTYEILKFTATNNDITGRFEVKPIYCYCKKQLMVSIGTCRKIQKFATDVLGNLYIVKDNVLKLEFK

SEQ ID NO: 75 - protein, 1348 aa, Finegoldia magna
MKSEKKYYIGLDVGTNSVGWAVTDEFYNILRAKGKDLWGVRLFEKADTAANTRIFRSGRRRNDRKGMRLQILREIFEDEIKKVDKDFYDRLDESKFWAEDKKVSGKYSLFNDKNFSDKQYFEKFPTIFHLRKYLMEEHGKVDIRYYFLAINQMMKRRGHFLIDGQISHVTDDKPLKEQLILLINDLLKIELEEELMDSIFEILADVNEKRTDKKNNLKELIKGQDFNKQEGNILNSIFESIVTGKAKIKNIISDEDILEKIKEDNKEDFVLTGDSYEENLQYFEEVLQENITLFNTLKSTYDFLILQSILKGKSTLSDAQVERYDEHKKDLEILKKVIKKYDEDGKLFKQVFKEDNGNGYVSYIGYYLNKNKKITAKKKISNIEFTKYVKGILEKQCDCEDEDVKYLLGKIEQENFLLKQISSINSVIPHQIHLFELDKILENLAKNYPSFNNKKEEFTKIEKIRKTFTFRIPYYVGPLNDYHKNNGGNAWIFRNKGEKIRPWNFEKIVDLHKSEEEFIKRMLNQCTYLPEETVLPKSSILYSEYMVLNELNNLRINGKPLDTDVKLKLIEELFKKKTKVTLKSIRDYMVRNNFADKEDFDNSEKNLEIASNMKSYIDFNNILEDKFDVEMVEDLIEKITIHTGNKKLLKKYIEETYPDLSSSQIQKIINLKYKDWGRLSRKLLDGIKGTKKETEKTDTVINFLRNSSDNLMQIIGSQNYSFNEYIDKLRKKYIPQEISYEVVENLYVSPSVKKMIWQVIRVTEEITKVMGYDPDKIFIEMAKSEEEKKTTISRKNKLLDLYKAIKKDERDSQYEKLLTGLNKLDDSDLRSRKLYLYYTQMGRDMYTGEKIDLDKLFDSTHYDKDHIIPQSMKKDDSIINNLVLVNKNANQTTKGNIYPVPSSIRNNPKIYNYWKYLMEKEFISKEKYNRLIRNTPLTNEELGGFINRQLVETRQSTKAIKELFEKFYQKSKIIPVKASLASDLRKDMNTLKSREVNDLHHAHDAFLNIVAGDVWNREFTSNPINYVKENREGDKVKYSLSKDFTRPRKSKGKVIWTPEKGRKLIVDTLNKPSVLISNESHVKKGELFNATIAGKKDYKKGKIYLPLKKDDRLQDVSKYGGYKAINGAFFFLVEHTKSKKRIRSIELFPLHLLSKFYEDKNTVLDYAINVLQLQDPKIIIDKINYRTEIIIDNFSYLISTKSNDGSITVKPNEQMYWRVDEISNLKKIENKYKKDAILTEEDRKIMESYIDKIYQQFKAGKYKNRRTTDTIIEKYEIIDLDTLDNKQLYQLLVAFISLSYKTSNNAVDFTVIGLGTECGKPRITNLPDNTYLVYKSITGIYEKRIRIK

SEQ ID NO: 76 - protein, 1129 aa, Streptococcus infantarius
MSNGKILGLDIGVASVGVGIIDSKTGNVIHANSRLFSAANAENNAERRGFRGARRLTRRKKHRVKRVRDLFEKYDISTDFRNLNLNPYELRVKGLTEQLTNEELFAALRTIAKRRGISYLDDAEDDSTGSSDYAKSIDENRRLLKTKTPGQIQLERLEKYGQLRGNFTVYDENGEAHRLINVFSTSDYKNEARKILETQSNYNKQITDEFIEDYIEILTQKRKYYHGPGNEKSRTDYGRFRTDGTTLENIFGILIGKCSFYPEEYRASKASYTAQEFNFLNDLNNLKVPTETGKLSTEQKEYLVDFAKKSKALGASKLLKEIAKIVDCSVDDIKGYRVDNKDKPDLHTFEPYRKLKFNLSSIDIDELSRETLDKLADILTLNTEREGIEDAIKRNLPSQFTEEQISEIVQIRKNQSSAFNKGWHSFSAKLMNELIPELYVTSEEQMTILTRLEKFKVNKKSSKNTKTIDEKEITDEIYNPVVAKSVRQTIKIINAAVKKYGDFDKIVIEMPRDKNAEDEKKFIDKKQKENKKEKDDSLKRAAFLYNGTDNLPDGVFHGNKELKTKIRLWYQQGERCLYSGKLISIHDLVHNSNKFEIDHILPLSLSFDDSLANKVLVYAWTNQEKGQKTPYQVIDSMDTAWSFREMKDYVLKQKGLGKKKCEYLLTTENIDKIEVKKKFIERNLVDTRYASRVVLNSLQTALKELGKDTKVSVVRGQFTSQLRRKWNIDKSRETYHHHAVDALIIAASSQLKLWQKQENPMFESYGENQVVNKETGEILSISDDKYKELVFQPPYQGFVNTISSKGFEDEILFSYQVDSKFNRKVSDATIYSTRKAKLGKDKKDETYVLGKIKDIYSQDGFDTFIKRYKKDKTQFLMYQKDPLTWENVIEVILRDYPSEKLSEDGKKTVKCNPFEEYRRENGLICKYSKKGNGTPIKSLKYYDKKLGNCIDITPEKSKNRVVLRQISPWRADIYFNLETLKYELMGLKYSDLSFEKGTGKYHISQEKYDAIREKEGIGKKSEFKFTLYRNDLILIKDTLNNCERMLRFGSKNDTSKHYVELKPLEKGTFDSEEEILPVLGKVAKSGQFIKGLNKPNISIYKVRTDVLGNKFFIKKEGDKPKLDFKNNNK

SEQ ID NO: 77 - protein, 1065 aa, Clostridium perfringens
MNKDINYALGLDIGITSVGWAVINLDLNRIEDLGVRIFNAAENLKDGSSLALPRRLARGRRRLLRRKAYRVERVRKLILKNNILTKEELEGLFKNKEVIDVWEARVKGLDYKLSREEWAKILINFCKRRGFKSNRKNEAKDKEAGQILSSISYNIEKMKETNSRTIGEYIYNEVKNSEDSYAPLRNKFGEYKMCVSRDVIREEIHTLFEKQRELGNNFASDEIEDKYFEIFNSQRPFSNFEDLEKLVGFCTFERKKHKRAPKHCISSEEFTLYEGINKLSIIKDGEKRKLSEEERTLVVNEAFNKKEIKYTTLRKLLGLSEEELFSTLTYSIDKDISKTENTKFVSLKGYHEIKRAIEKGVSKKAWQDIENNRNLLNDIAYVLTLGKTDDEIEKQLRLRNVPEELFESLLDMSFNKFNNLSIYALEKILPFMKEGYQYNEACEKAGYNFKAIYEGVRTKKLPVIEIDEIVNPVVNRALAQTRKVINSVIDKYGSPVRINIELARDLAKNFKDRKLIEKEQKENRANLDKIRENLRELMDKEPTVVEVLKYRLWEQQRGECAYTQSQIPLERLFSPGYCEIDHIIPFSRSFDDSLSNKILVLGSENQRKGNRTPYEYFGEDSERWNSFEIWVKGSYLNYKKKANLLKKKFSEEEQRDWKARNLQDTKYICRYISNFVNNRLEFKESENKQKVITVNGRATAYLRSRWGLNKVREDGDKHHALDAAVVGVTTQGMVQKISKYSKAHELYTVRKNDEFVDVETGECVDVDEYKEIRKDILPRPWRGFSEELKLRLSDNPLEELKKSPIETYNEEFIKENVKPIFVSRVPFRKISGKLFKETIYSERAFKDGYFVSKKSLVDLKRGDLDNFYNYECDKKLYDAISERMKEFNYNGKKAFESPFRKPTKSGKEGPVVRSVKIKSAVPFKDGIPMNEGLVAKEGMVRIDIYEKEGKYFVVPVYRYQLAKGIVPKRAAIAKKDELKWPIMDQTYNFKFSIYKNDLIEVKYDKKGVYFGYYDGFDRNSASLTIEKHDNSERYRSIGLKVGVLEINKYEVDVLGNYHKVKLGGN

SEQ ID NO: 78 - protein, 1195 aa, Elusimicrobium minutum
MQKNINTKQNHIYIKQAQKIKEKLGDKPYRIGLDLGVGSIGFAIVSMEENDGNVLLPKEIIMVGSRIFKASAGAADRKLSRGQRNNHRHTRERMRYLWKVLAEQKLALPVPADLDRKENSSEGETSAKRFLGDVLQKDIYELRVKSLDERLSLQELGYVLYHIAGHRGSSAIRTFENDSEEAQKENTENKKIAGNIKRLMAKKNYRTYGEYLYKEFFENKEKHKREKISNAANNHKFSPTRDLVIKEAEAILKKQAGKDGFHKELTEEYIEKLTKAIGYESEKLIPESGFCPYLKDEKRLPASHKLNEERRLWETLNNARYSDPIVDIVTGEITGYYEKQFTKEQKQKLFDYLLTGSELTPAQTKKLLGLKNTNFEDIILQGRDKKAQKIKGYKLIKLESMPFWARLSEAQQDSFLYDWNSCPDEKLLTEKLSNEYHLTEEEIDNAFNEIVLSSSYAPLGKSAMLIILEKIKNDLSYTEAVEEALKEGKLTKEKQAIKDRLPYYGAVLQESTQKIIAKGFSPQFKDKGYKTPHTNKYELEYGRIANPVVHQTLNELRKLVNEIIDILGKKPCEIGLETARELKKSAEDRSKLSREQNDNESNRNRIYEIYIRPQQQVIITRRENPRNYILKFELLEEQKSQCPFCGGQISPNDIINNQADIEHLFPIAESEDNGRNNLVISHSACNADKAKRSPWAAFASAAKDSKYDYNRILSNVKENIPHKAWRFNQGAFEKFIENKPMAARFKTDNSYISKVAHKYLACLFEKPNIICVKGSLTAQLRMAWGLQGLMIPFAKQLITEKESESFNKDVNSNKKIRLDNRHHALDAIVIAYASRGYGNLLNKMAGKDYKINYSERNWLSKILLPPNNIVWENIDADLESFESSVKTALKNAFISVKHDHSDNGELVKGTMYKIFYSERGYTLTTYKKLSALKLTDPQKKKTPKDFLETALLKFKGRESEMKNEKIKSAIENNKRLFDVIQDNLEKAKKLLEEENEKSKAEGKKEKNINDASIYQKAISLSGDKYVQLSKKEPGKFFAISKPTPTTTGYGYDTGDSLCVDLYYDNKGKLCGEIIRKIDAQQKNPLKYKEQGFTLFERIYGGDILEVDFDIHSDKNSFRNNTGSAPENRVFIKVGTFTEITNNNIQIWFGNIIKSTGGQDDSFTINSMQQYNPRKLILSSCGFIKYRSPILKNKEG

SEQ ID NO: 79 - protein, 1101 aa, Akkermansia muciniphila
MSRSLTFSFDIGYASIGWAVIASASHDDADPSVCGCGTVLFPKDDCQAFKRREYRRLRRNIRSRRVRIERIGRLLVQAQIITPEMKETSGHPAPFYLASEALKGHRTLAPIELWHVLRWYAHNRGYDNNASWSNSLSEDGGNGEDTERVKHAQDLMDKHGTATMAETICRELKLEEGKADAPMEVSTPAYKNLNTAFPRLIVEKEVRRILELSAPLIPGLTAEIIELIAQHHPLTTEQRGVLLQHGIKLARRYRGSLLFGQLIPRFDNRIISRCPVTWAQVYEAELKKGNSEQSARERAEKLSKVPTANCPEFYEYRMARILCNIRADGEPLSAEIRRELMNQARQEGKLTKASLEKAISSRLGKETETNVSNYFTLHPDSEEALYLNPAVEVLQRSGIGQILSPSVYRIAANRLRRGKSVTPNYLLNLLKSRGESGEALEKKIEKESKKKEADYADTPLKPKYATGRAPYARTVLKKVVEEILDGEDPTRPARGEAHPDGELKAHDGCLYCLLDTDSSVNQHQKERRLDTMTNNHLVRHRMLILDRLLKDLIQDFADGQKDRISRVCVEVGKELTTFSAMDSKKIQRELTLRQKSHTDAVNRLKRKLPGKALSANLIRKCRIAMDMNWTCPFTGATYGDHELENLELEHIVPHSFRQSNALSSLVLTWPGVNRMKGQRTGYDFVEQEQENPVPDKPNLHICSLNNYRELVEKLDDKKGHEDDRRRKKKRKALLMVRGLSHKHQSQNHEAMKEIGMTEGMMTQSSHLMKLACKSIKTSLPDAHIDMIPGAVTAEVRKAWDVFGVFKELCPEAADPDSGKILKENLRSLTHLHHALDACVLGLIPYIIPAHHNGLLRRVLAMRRIPEKLIPQVRPVANQRHYVLNDDGRMMLRDLSASLKENIREQLMEQRVIQHVPADMGGALLKETMQRVLSVDGSGEDAMVSLSKKKDGKKEKNQVKASKLVGVFPEGPSKLKALKAAIEIDGNYGVALDPKPVVIRHIKVFKRIMALKEQNGGKPVRILKKGMLIHLTSSKDPKHAGVWRIESIQDSKGGVKLDLQRAHCAVPKNKTHECNWREVDLISLLKKYQMKRYPTSYTGTPR

SEQ ID NO: 80 - protein, 1187 aa, Bifidobacterium longum
MLSRQLLGASHLARPVSYSYNVQDNDVHCSYGERCFMRGKRYRIGIDVGLNSVGLAAVEVSDENSPVRLLNAQSVIHDGGVDPQKNKEAITRKNMSGVARRTRRMRRRKRERLHKLDMLLGKFGYPVIEPESLDKPFEEWHVRAELATRYIEDDELRRESISIALRHMARHRGWRNPYRQVDSLISDNPYSKQYGELKEKAKAYNDDATAAEEESTPAQLVVAMLDAGYAEAPRLRWRTGSKKPDAEGYLPVRLMQEDNANELKQIFRVQRVPADEWKPLFRSVFYAVSPKGSAEQRVGQDPLAPEQARALKASLAFQEYRIANVITNLRIKDASAELRKLTVDEKQSIYDQLVSPSSEDITWSDLCDFLGFKRSQLKGVGSLTEDGEERISSRPPRLTSVQRIYESDNKIRKPLVAWWKSASDNEHEAMIRLLSNTVDIDKVREDVAYASAIEFIDGLDDDALTKLDSVDLPSGRAAYSVETLQKLTRQMLTTDDDLHEARKTLFNVTDSWRPPADPIGEPLGNPSVDRVLKNVNRYLMNCQQRWGNPVSVNIEHVRSSFSSVAFARKDKREYEKNNEKRSIFRSSLSEQLRADEQMEKVRESDLRRLEAIQRQNGQCLYCGRTITFRTCEMDHIVPRKGVGSTNTRTNFAAVCAECNRMKSNTPFAIWARSEDAQTRGVSLAEAKKRVTMFTFNPKSYAPREVKAFKQAVIARLQQTEDDAAIDNRSIESVAWMADELHRRIDWYFNAKQYVNSASIDDAEAETMKTTVSVFQGRVTASARRAAGIEGKIHFIGQQSKTRLDRRHHAVDASVIAMMNTAAAQTLMERESLRESQRLIGLMPGERSWKEYPYEGTSRYESFHLWLDNMDVLLELLNDALDNDRIAVMQSQRYVLGNSIAHDATIHPLEKVPLGSAMSADLIRRASTPALWCALTRLPDYDEKEGLPEDSHREIRVHDTRYSADDEMGFFASQAAQIAVQEGSADIGSAIHHARVYRCWKTNAKGVRKYFYGMIRVFQTDLLRACHDDLFTVPLPPQSISMRYGEPRVVQALQSGNAQYLGSLVVGDEIEMDFSSLDVDGQIGEYLQFFSQFSGGNLAWKHWVVDGFFNQTQLRIRPRYLAAEGLAKAFSDDVVPDGVQKIVTKQGWLPPVNTASKTAVRIVRRNAFGEPRLSSAHHMPCSWQWRHE

SEQ ID NO: 81 - protein, 166 aa, uncultured Termite
MNKVQEIEYKKIREKLADREYRIGLDLGVGSIGYVVVSLKECNDLSYLPEDIILSGSRIFKSSIGAVERREFRLQRNSHRHHRERMRFLWQLLAEKQLALQSSKDLEKKENSADCETSQKRFPINILKEDPYILRYKALEEKLSLFQLGYVLYHIANHSNTAYENT

SEQ ID NO: 82 - protein, 1032 aa, uncultured Termite
MLYHIANHRGTDSVRSFLEYDDDKIKENTLTAKIAKETKKVIDAKKYRTFGEYLYKGKIEKFQQNIRKKVSNRKTPANKNKEFAVTRDVIIKETEKILASQKQYYTYILTDEYIKKIKDAISYQTEKLIPESGYCPYFKDEKRLPRSHKLNEYRRMYEALNNAKYFDPVLDENTGEILSYQEKEFSREEKKILFDEVLLKGMELTESGAKKLLYHLPDGCEVQLQGRDKTTQKIKGYALVDLEASPFWLRLSQQQQDEFLYDWNSLPLEKLKPKLTNYYSLTESEVDETFQEIKLPSNYASVGKKAMEILLTYIKDGCSYTEALEKAVSEGKLKVDKQTMIYDSLPYYGKILKESTQKLIGKAFSKQFADRNYKEPDTNKNEREFGKIANPVVHQTLNELRKLINEIITVFGKKPLEIGLETTRELKKSKKNREYLSKQQNKNEYARNRIYKEYIEPHLSQIKSRQENPSKYISKFELLEEQNFICPFCSEKITPDDIINSKVDVEHIFPIEESEDITKNNLVIAHNECNADKGKKSPFDAFGDKTSGKYRWNCILHNAQKNLPHKVWRFYQGSLEKFLENKPMSRRFGTDNSYISKIAARYLACLFNDPYHSEIFCIKSSLIAQLRIAWDLNSIMVPLVKNILSEKELEEFKISKNKKIRIDNRHHALDAIVIAYANRGYHNFLNRIHAKEYKINYREKSWLSKILLPPLNRDLEDFKISVKDSIEKANVSIKHDHNTNGSLVKATAYKVYYSGAGEYIITTSKNVEEISFKEKEDPKDTLYRALCKFECRDIDIKDEKLIKKLKYNSTLYKKVQNNLSKAKQELEQDNKKTEEEGKKSQKITEVRIYKKACSLVKGQYIQCGSRLKDKFFAVKEPTEIKTGLGYDTGDNLFLDLYYDKTGKLCGEIIRKVNFNRNKPNYQKEGYTLFERIYQSDILEVDTSEDRISLKNKTGSAPSDRTFIKVNTFTEVNAYFDGKRDKIQIFFGNLLKSSFKNDSFFISSMQKYNVRKVILTSLGIIKYRSQILKNKEV

SEQ ID NO: 83 - protein, 1032 aa, uncultured Termite
MKKRILGLDIGIASVGWALVEFDDEFQDNKKKGTIIKSGVRIFTRAETPKERESLAKPRREARSQRRRIRRRVERLNSIRELFVKNGVVEEWSVSKKNPNNIYITLNQIKTPWQLRMESLDRKLTNEQFAVVLTHLAKHRGYKSLRKDDKAGKVLEAISQNKKRLNDSDYRTLGEMFCKNESYKEHKRNKGGEYINSVARELIEEEVEKIFVKQREKGNNFADVNTEREYLKIAFSQKPAGSISKMVGFCTFENGEKRAPRDSYSAELFKVLCTINNTTFTDMKTGEIRSFSKEEIGKTLETVKNVKDVKYAKIRKDLGLEDSVKFSGVDYRENAKSKGEGEIFVSMKTYHEIKSKIEKLSKEKWDNLKGNTELLDSIVNIIANLKDDESIKKEFQKLKIDEDIIDVLLNFEFKKFINLSFKALRKIIPFQFQGQKYITASTSAGYSLKQEGIKNKLVPPAKENINVAVVARAFAQTRKVINAVIRKYGQFDQINIELATELKNSKFDRSKIEEGQKKFQSQKDKIFKEVQELRGGMTPSSSLLLKYRLWREQDERCVYSGRKISFEDLLDTGFLDIDHIIPYSKSMDDSFNNKVLCLAEENRNKKNDIPFNYYQRIDRDWNLLISIITSMKNMKIAKKSRLLKQELSDIEGFIERNINDTRYATRYIKDFLENNLEFKENEFIKVKVQARSGGLTSVLSYNWGMSKDREESYFHHAKDAIIVACSTQGMVQYISKISQQYENDKDKMKKIKDKTENCIPKPWDSFRADVEESIEGIFVSFAPRHKVTGSAHKETIYSKKHLEKERYVTVKKSLDKIKLSDLENIPCNENCGIIRVLKERLEKFKNDSLKAFADPVHMPTKCPNKKGPVIRSVKIKESNKTGIEVRKGLAERGEMVRVDVFIKDKKYYLVPIYVSDFKNKDLPNKAIAALKLENEWIMIDKTYSFKFSLFKDDLIKIKKKKEEIFGYFGGVHRSTGTIKIKSRHKPKEIDEGIGSRCLLDFRKFQVDVLGNYTEVKHEKRMPAYITRKDKKH

SEQ ID NO: 84 - protein, 1361 aa, Lactobacillus casei
MTKLGKPYGIGVDIGSNSIGFAAVDENSHLIRLKGKTVIGARLFEEGKAAADRRASRTTRRRLSRNRWRLSFLRDFFESHITPTGPNFFMRQKYSEISPKDKARYKYEKRLFNDRTDAEFYQQYPTMYHLRNRLLTDPSKADVREIYFAIHHILKSRGHFLTSGYAKDFNTNKVALNEIFPALQDAYAQVYPDLDITFDENKVNEFKTVLLNEKATPSDTQRALVNLLLAEDGDKDILKQQKQVLTEFAKAVVGLKTKLNVALGTEVDSSEATVWNFSLGQLDDKWAGIESAMTDEGTEILDQIRDLYRARLLNGIVPAGKTLSQAKVDDYAQHHEDLELFKDYLKQLEDDGTAKAIRQLYDRYIDGDDAKPFVREDFVKALTKEVTAHPNAKSPELLERLAQPDFMLKQRNKANGAIPVQMQQRELDQIIKNQSVYYDWLAAPNPVEKHRKSMPYQLDELLNFRIPYYVGPLVTAKEQKAAQGGVFAWMVRKDPDGNITPYNFDEKVDREASANTFIQRMKTTDTYLIGEDVLPKQSLLYQRYEVLNELNNVRVNNEKLSIEQKQQVIRELFERHNSVTIKQFAENLRAHGDYAHIPEIRGLADEKRFLSSLSTYRQLKSLLPDAIDDPAKQADIENIIAWSTVFEDAAIFKTKLKEINWLDSQTITKLSNIRYRGWGQFSHKFLNGLTLGNGHTIIQELFLSNNNLMQILTDETLQKKMTELNADKLKAANINDAIDDAYTSPSNKKALRQVLRVIEDIKRAADGQDPSWLYVETADGGGTPGKRTRARQHQLQEIYANAAHELIDSAVRGELEDKIADKADFNDRLVLYFMQGGRDIYTGTPLNIDQLSSYDIDHILPQSLIKDNSLDNRVLVHAIINREKNATFASTIYAQKMNATWRQWHEAGLISGRKLRNLQMRPDQIDKYASGFVARQLVETRQIIKLTEQIVAAQYPETKIIAVKAGLSHQLREELEFPKNRDVNHYHHAFDAFLAARIGTYLLKRFPNLQAFFTYGKFKKADVKKLRGFNFIRDITHAEDKIVVKDTGEVIWDKKRDVDELDRIYNFKRMLITHEVHFEKADLFKQTVYGAKDSKEAGGKKQLISKKKGYPVDIYGGYTQETGSYLSVVRLTKKAMYAVVKVSTRDAAKLAVAKSISEQKENETLNDIIDEKLSKISKNGKITHELFEVVLPRVGQKTLFKNSKYNLFLVNSDTYMHNYQELWMPREYQKMWKDISLSKYGDAQTEDQLDQIFGFIVSQVNSYFNLYDINQFRKKLNDAADKFATLPMRDTDDMQGKIATIGQLLIGLQANAARSDLRNLDIKTPLGLLQIPNGISLDSDTSVVYQSPTGLLEREVHLSDL

SEQ ID NO: 85 - protein, 1348 aa, Streptococcus equi
MKKPYTIALDIGTNSVGWVVVTDDYRVPTKKMKVLGNTERKTIKKNLIGALLFDSGDTAEGTRLKRTARRRYTRRKNRLRYLKEIFTEEMAKVDDGFFQRLEDSFYVLEDKEGNKHPIFANLADEVAYHKKYPTIYHLRKELVDNPQKADLRLIYLAVAHIIKFRGHFLIEGTLSSKNNNLQKSFDHLVDTYNLLFEEQRLLTEGINAKELLSAALSKSKRLENLISLIPGQKKTGIFGNIIALSLGLTPNFKANFGLSKDVKLQLAKDTYADDLDSLLAQIGDQYADLFLAAKNLSDAILLSDILTESDEITRAPLSASMVKRYREHHKDLVTLKTLIKDQLPEKYQEIFLDKTKNGYAGYIEGQVSQEEFYKYLKPILARLDGSEPLLLKIDREDFLRKQRTFDNGSIPHQIHLEELHAILRRQEVFYPFLKDNRKKIESLLTFRIPYYVGPLARGHSRFAWVKRKFDGAIRPWNFEEIVDEEASAQIFIEKMTKNDLYLPNEKVLPKHSLLYETFTVYNELTKVKYATEGMTRPQFLSADQKQAIVDLLFKTNRKVTVKQLKENYFKKIECWDSVEITGVEDSFNASLGTYHDLLKIIQDKDFLDNPDNQKIIEDIILTLTLFEDKKMISKRLDQYAHLFDKVVLNKLERHHYTGWGRLSGKLINGIRDKQSGKTILDFLKADGFANRNFMQLIHDSELSFIDEIAKAQVIGKTEYSKDLVGNLAGSPAIKKGISQTIKIVDELVKIMGYLPQQIVIEMARENQTTAQGIKNARQRMRKLEETAKKLGSNILKEHPVDNSQLQNDKRYLYYLQNGKDMYTGDDLDIDYLSSYDIDHIIPQSFIKNNSIDNKVLTSQGANRGKLDNVPSEAIVRKMKGYWQSLLRAGAISKQKFDNLTKAERGGLTQVDKAGFIQRQLVETRQITKHVAQILDSRFNTEFDDHNKRIRKVHIITLKSKLVSDFRKEFGLYKIRDINHYHHAHDAYLNAVVAKAILGKYPQLAPEFVYGDYPKYNSFKERQKATQKMLFYSNILKFFKDQESLHVNSDGEEIWNANKHLPIIKNVLSIPQVNIVKKTEVQTGGFYKESILSKGNSDKLIPRKNNWDTRKYGGFDSPTVAYSVLVIAKMEKGKAKVLKPVKEMVGITIMERTAFEENPVVFLEARGYREIQEHLIIKLPKYSLFELENGRRRLLASASELQKGNELFLPVDYMTFLYLAAHYHELTGSSEDVLRKKYFVDRHLHYFDDIIQMINDFAERHILASSNLEKINHTYHNNSDLPVNERAENIINVFTFVALGAPAAFKFFDATIDRKRYTSTKEVLNATLIHQSVTGLYETRIDLSQLGEN

SEQ ID NO: 86 - protein, 1341 aa, Ruminococcus lactaris
MGKGYYVGLDMGTGSVGWAVTDESYQILRRHGKAMWGVRLFESAKTAEERRMFRTGRRRLDRRGWRIEILQEIFAEEISRVDPGFFLRMKESKYYPEDKRDIQGNCPELPYTLFVDKTFTDKDFHKKYPTIYHLRKMLMETEDTPDMRLVYLALHHMMKHRGHFLLSGDISQVTEFKNTFNQFIENIRNEEMDFEIELDESAVQMIEETLKDKNLTRSAKKSKLVKGLNAKNVRDKAFLTLLSGGTVKLSDLFGMEELNEGERPKISFADNGYEEYAAVVEMELGELYYIVESAKAVYDWAILSDILGGSTSVSDAKVRAYEKHKADLKYLKAVVKEYFPKEVYNAVFVESSDKLNNYPAYIGMTKKNGKKVSLEGKRCSREEFMDFLKKNIVVKLPDEEAKMYLQSELEKDSFLPKQVNKDNGVIPYQVHKYELKKILDNLGDKIPFLKENAEKIEKLFSFRIPYYVGPLRTGNGENSKFAWAERKSTEKIYPWNFENVIDVEQSAENFIRRMTNKCTYLIGEDVLPKDSLLYSKFMVLNELNNLRLDGQKISVELKQKIYRDVFCRSRKVTQKKLKSYLIREGIAGKNVELTGIDGDFKGSLTAYHDFKEKLIDVELTQKEKEEIILNIVLFGDDKKLLKQRLKKKFPQLTEKQINTVTALSYKGWGRLSKKLLEEVTVPAPETGEVWNIITALWETNDNFMQLLSKEYQFSDRIEEFNEEKADPEVSYQTIEDLYVSPAVKRQIWQTLQIIQEIEKVMGEKPKRVFVEMAREKQENKRTESRKKTLSDLYTKCKKEEPEWIEALCTSLEKHEEHQLRSDKLYLYYTQKGRCMYSGEPIDLEDLWDNTKYDIDHIYPQSKTMDDSLKNRVLVKKEYNAKKSDTYPIAADIQKKMMPFWKSLLTGGFIPKEKYDRLVRNNPLDANELAGFIERQIVETRQSTKAVAEILKKILPDTEIVYVKAKTVSKFRQDFDFIKVRDMNDLHHAKDAYLNIVVGNVYFVKFTKNAAWFVKENPGRTYNLEKMFIWDVARDGEIAWKAGKSGSIVQVRAMMEKNHILVTRRSYEVKGGLFDQQILKKGKGQVPVKESDERLRDIGKYGGYNKAAGVYFMLVSSKDKKGKEQRTIEFVPIYLKDRVEKDMESARNYLMEERGLREPKILIKKIKIDTLFKVDGFYMWLSGRTSNQLIFKGANQLILSKEDMKTLKKVVKYIQRQKEDKNVKISMRDGITEEELLKLYETFLDKIRHSIYGARLSSQEKTLVNGKEKFIDLSVEAKCQVLYEILHLFQCQSGAANLKMIGGPASAGILVMNNNISKCKNISIVNQSPTGIYEKEIDLLRV

SEQ ID NO: 87 - protein, 1003 aa, Gluconacetobacter diazotrophicus
MIDESLTFGIDLGIGSCGWAVLRRPSAFGRKGVIEGMGSWCFDVPETSKERTPTNQIRRSNRLLRRVIRRRRNRMAAIRRLLHAAGLLPSTDSDALKRPGHDPWELRARGLDKPLKPVEFAVVLGHIAKRRGFKSAAKRKATNISSDDKKMLTALEATRERLGRYRTVGEMFARDPDFASRRRNREGKYDRTTARDDLEHEVHALFAAQRRLGQGFASPELEEAFTASAFHQRPMQDSERLVGFCPFERTEKRAAKLTPSFERFRLLARLLNLRITTPDGERPLTVDEIALVTRDLGKTAKLSIKRVRTLIGLEDNQRFTTIRPEDEDRDIVARTGGAMTGTATLRKALGEALWTDMQERPEQLDAIVQVLSFFEANETITEKLREIGLTLAVLDVLLTALDAGVFAKFKGAAHISTKAARNLLPHLEQGRRYDEACTMAGYDHAASRLSHHGQIVAKTQFNALVTEIGESIANPIARKALIEGLKQIWAMRNHWGLPGSIHVELARDVGNSIEKRREIEKHIEKNTALRARERREVHDLLDLEDVNGDTLLRYRLWKEQGGKCLYTGKAIHIRQIAATDNSVQVDHILPWSRFGDDSFNNKTLCLASANQQKKRSTPYEWLSGQTGDAWNAFVQRIETNKELRGFKKRNYLLKNAKEAEEKFRSRNLNDTRYAARLFAEAVKLLYAFGERQEKGGNRRVFTRPGALTAALRQAWGVESLKKQDGKRINDDRHHALDALTVAAVDEAEIQRLTKSFHEWEQQGLGRPLRRVEPPWESFRADVEATYPEVFVARPERRRARGEGHAATIRQVKERECTPIVFERKAVSSLKEADLERIKDGERNEAIVEAIRSWIATGRPADAPPRSPRGDIITKIRLATTIKAAVPVRGGTAGRGEMVRADVFSKPNRRGKDEWYLVPVYPHQIMNRKAWPKPPMRSIVANKDEDEWTEVGPEHQFRFSLYPRSNIEIIRPSGEVIEGYFVGLHRNTGALIPTPVGPDSYVIA

SEQ ID NO: 88 - protein, 1368 aa, Streptococcus pyogenes
MDKKYSIGLDIGTNSVGWAVITDDYKVPSKKFKVLGNTDRHSIKKNLIGALLFDSGETAEATRLKRTARRRYTRRKNRICYLQEIFSNEIAKVDDSFFHRLEESFLVEEDKKHERHPIFGNIVDEVAYHEKYPTIYHLRKKLADSTDKADLRLIYLALAHMIKFRGHFLIEGDLNPDNSDVDKLFIQLVQTYNQLFEENPINASRVDAKAILSARLSKSRRLENLIAQLPGEKRNGLFGNLIALSLGLTPNFKSNFDLAEDAKLQLSKDTYDDDLDNLLAQIGDQYADLFLAAKNLSDAILLSDILRVNTEITKAPLSASMIKRYDEHHQDLTLLKALVRQQLPEKYKEIFFDQSKNGYAGYIDGGASQEEFYKFIKPILEKMDGTEELLAKLNREDLLRKQRTFDNGSIPHQIHLGELHAILRRQEDFYPFLKDNREKIEKILTFRIPYYVGPLARGNSRFAWMTRKSEETITPWNFEEVVDKGASAQSFIERMTNFDKNLPNEKVLPKHSLLYEYFTVYNELTKVKYVTEGMRKPAFLSGEQKKAIVDLLFKTNRKVTVKQLKEDYFKKIECFDSVEISGVEDRFNASLGTYHDLLKIIKDKDFLDNEENEDILEDIVLTLTLFEDREMIEERLKTYAHLFDDKVMKQLKRRRYTGWGRLSRKLINGIRDKQSGKTILDFLKSDGFANRNFMQLIHDDSLTFKEDLQKAQVSGQGDSLHEHIANLAGSPAIKKGILQTVKVVDELVKVMGRHKPENIVIEMARENQTTQKGQKNSRERMKRIEEGIKELGSDILKEYPVETTQLQNEKLYLYYLQNGRDMYVDQELDINRLSDYDVDHIVPQSFLKDDSIDNKVLTRSDKNRGKSDNVPSEEVVKKMKNYWKQLLNAKLITQRKFDNLTKAERGGLSELDKAGFIKRQLVETRQITKHVAQILDSRMNTKYDENDKLIREVRVITLKSKLVSDFRKDFQFYKVREINNYHHAHDAYLNAVVGTALIKKYPKLESEFVYGDYKVYDIRKMIAKSEQEIGKATAKYFFYSNIMNFFKTEITLANGEIRKRPLIETNGETGEIVWDKGRDFATVRKVLSMPQVNIVKKTEVQTGGFSKESILPKRNSDKLIARKKDWDPKKYGGFDSPTVAYSVLVVAKVEKGKSKKLKSVKELVGITIMERSSFEKDPVDFLEAKGYKEVRKDLIIKLPKYSLFELENGRKRMLASAGELQKGNELALPSKYVNFLYLASHYEKLKGSPEDNEQKQLFVEQHKHYLDEIIEQISEFSKRVILADANLDKVLSAYNKHRDKPIREQAENIIHLFTLTNLGAPAAFKCFDTTIGRNRYKSIKEVLDATLIHQSITGLYETRIDLSQLGGD

SEQ ID NO: 89 - protein, 1504 aa, Bacteroides dorei
MKNIVGLDLGTNSIGWAVVNGSVNDDGSEQLVKIQASGSRIIPMDAAMIGDFNKGNSISQTAERTRLRGVRRLSERYLLRRERLHRILDILGFLPFHFAQDLDRHGKIVKGKEPKLAWRKNEAGQFEFIFQDSFKEMLEDFKLNYPNLITDDKKVPYDWTIYYLRKKGLTSKISKEELAWILLNFNQKRGYYQLRGEEEEENKDKLVEFYALKVVAVEDSGEKKGKDIWYNVHLENGWVYRRTSNMSLDWVGKTKEFIVTTDLEKDGTPKKDKEGNVKRSFRAPKEDDWSLVKKKTEADIDQTHKTVGAYIYDTLLGNPSQKIRGRLVRTIERKYYKEELKLILEKQKEFHLELQDRALYAACIEELYPINEAHRNNVGNRDFTYLFLEDILFYQRPLKSKKSLIDNCPYEENQGLDKETGEIKSFPVKCIAKSHPLFQEFRLWQFIINLRIYRKDLAQDVDVTNELLKTEEDYVALFDWLNGKKEIDQKAFLKYPVFGLKKEIENYRWNYVQDKPYPCNETRSLMLARLEKCDISIEFLTKENEEALWHILYSVEDKNEIVKALQKFADKHDLNASFVDVFQKFPPFKKEYGSYSAKAIKKLLPLMRMGKYWSENSIDKGTRERIDKIITGEYDEKIENRVREKAIHLADVSDFKGLPLWLVCYIVYGRHSEAKEIIQWKSPADIDSYLRSFKQHSLRNPIVEQIIIETLRVVRDIWKQVGNIDEIHVELGREMKNPADKRKKMTQQMSENENTNLRIKYLLTEFLNPEYEVENVRPYSPSQQDILRIYEEGVLNSVSDLPEEISDILKKFTETDLKKRPSRSEVLRYKLWLEQKYRSPYTGEVIPLGKLFTPAYEIEHVIPQSYYFDDSFSNKVICEAEVNKLKSNLLGHEFIVKHHGEIVELPFGKKVRIFTVDEYEQFVKDNYSRTRSKMKKLLMDDIPEEFVTRQLNDSRYISKVVKSLLSNIVREKGEEEAISKNVIPCTGGVTDRLKKDWGINEVWNKIILPRFQRLNELTGTNKFTTKNVGIQEIPTMPLELQKGFNKKRIDHRHHAMDAIIIACANRNIINYLNNKSATAKAELSRYDLQKMLCDKAKTDNNGNYKWVIRKPWASFTQDTYLALENIIVSFKQNLRVINKATNRFLHYNEEGKKIFVKQGKGDNWAIRKSMHKDTVFGEVNLRRIKTVALNEAMKNPQSIVVKDFKRKLLELWNLGFDAKRIKKYFEDNRETWSDINLSKIEVYYFSKDTKDRFFATRKPLDTSFDRKKIENNITDTGIQKILLRHLELKDNNPDIAFSPDGIDEMNRNIIQLNNGKYHQPIIKIRWYEQADKFAVGQTGNKSSKFVEAAKGTNLFFAVYESNILDKKTNTIIKKRNYATIPLNVAIERQKQGLPVAPEDENGNDPIFVLSPNDLVYLPTDDELANGIIAQPLDRGRIYKMVSSSGEQCFFIKHIVANVLVDKFEFSPLNKMERALTGEMIKMICIPIKVDRLGNVLESSSSYKK

SEQ ID NO: 90 - protein, 1426 aa, Capnocytophaga sputigena
MKNILGLDLGITSISFAHIVEDENKEKSEIKELGVRIVSLTTDEQSDFEKGKSITTNANRTLKHGARLNLDRYQQRRKYLIDLLQKANLITSSSILAENGKNTTHSTWQLRAKAVTERIEKEEFARVLLAINKKRGYKSSRKAKTEDEGQAIDGMAIAKRLYDENLTPGQLSLQLLQQNKKLLPDFYRSDLQREFDLVWNFQKQFYPDILTDSFYKELQGKGKDATSKAFSKRYHFDTAENKGSKESVRLQAYQWRAEAISKQLSKEEVAYVLTEINNNLNNASGYLGAISDRSKELYFNRQTVGQYLYAQLQENRHNSLKNKVFYRQDYLDEFERIWETQASFHKELTDELKKQIRDVVIFYQRKLKSQKGLISFCEFESKEIEIEKDGKTITKTIGARVVPKSSPLFQEFKIWQILNNVTCKRKGIRKKKSSAKSTELDLFNEPSQTIFSLDMECKQLLFDELNLKGDLKSDKVLKLLGYSPQEWEINYNQLEGNRTQKALYEAYLKIVEMEAHDVKDILQIKSAKDDWSLDESPLSASEIKEKVKDIFQALGICTKILYFDPLLPVKEFEKQDSYQLWHLLYSYESDDSTSGNETLYRILEKKYAFKREHARILANVALQDDYGSLSTKAIRKIYPNIKENQYSKACELAGYKHSKLSLTTEELEARELKNIIPLLKKNALRNPVVEKILNQMINVVNALIEKNSERDAEGKITKYFHFDEIRIELARELKKNAQKRYEMTQNINKAKLEHQKISEILQKKFGIKNPTKSDIIRYRLYQELEHNGYKELYTNAPIARDMLFSKNIEIEHIVPKARVFDDSFSNKTLTFHRINSNKGEYTAFDYITSLNSEEELNQYLTRVENAYKTKSISLTKYKNLLKKASEIGDGFINRDLRDTQYIAKKAKEILFQVTKNVLSTSGSITDRLREDWGLVDVMKELNMPKYQSLGLTEVEERKEGNKVTVIKNWTKRNDHRHHAMDALTVAFTKPSYIQYLNHLNARKDENNKNYSVILAIEEKETIKVPTNNGKNKRVFIEPIPNFRQVAKKHLEEIFISHKAKNKVVTKNVNKPAGTDKQQITLTPRGQLHKETIYGKYQYYVNKEEKVGVKFDERTITKVSNPLYREALLKRLQANDNDPKKAFTGKNALSKNPIYLDETKTKTLPEKVNLTYLEEDFSIRKDISPDNFKDLKSIEKVIDQGVKRILIKRLQDYDNDPKKAFVDLEKNPIWLNKEKGIAIKRVTISGVSNAQPLHIGKDHLGKTTLNKEGNEIPVDYVSTGNNHHVAIYRDKEGNLQEQIVSFFEAVVRTQQGLPIIDKTYKQEEGWQFLFTMKQNEMFVFPNATTGFNPAEIDLLDPKNKKLISPNLFRVQKIATKDYFFRHHLETNVETDNVLKNTTWKREGLSGLKDIVKVRINHLGDIVSIGEY

SEQ ID NO: 91 - protein, 1443 aa, Parabacteroides johnsonii
MIKLLYLEKLKQYTMKKILGLDLGTSSIGWALVNEAENSDEVSSIIKLGVRVNPLTVDEMQNFEKGKSITTNADRTLKRSMRRNLQRYKLRRDALIELLKKVGFITDKTILSEQGNRTTFETYRLRAKAAEEEISLKELARVLLMINKKRGYKSSRKAKGEEEGALIDGMEIAKKLYDEDLTPGQLCLQLLESGKKFFPDFYRSDLQEEFNKIWDFQKQFNLFSFCDVAKEEVKGKNKSQTWAILAKYFVETKKVNVWNEHEAQTENREEVYKLVGLKRTVKGEELKKENYRWRVQALTEQLDLEKIAVVLQEINGQISASSGYLGAISDRSKVLYFNRQTVGQYQMAELNKNPNMSLRNMVFYRQDYLDEFNVIWEKQAEFHKELTPELKKEIRDIIIFYQRRLKSQKGLISFCEFENREVVVEKEGKKQTKIIGCKVIPRSHPLFQEFKIWQTLNNIEVFVGEKKGKRKKSNVSSDLFGDTEDALITEGRRFLYQEEKKILAKELSIKKGLTKAEILRLLFENPQELDINFKQIDGNQTGFALFSAYSNMIEKYGYEPLDFKKPAEDLISQLKTVFTDLGWNTDLLFIDLDKENKEWEKQPYFRLWHLLYSFEGDNTPTGNGKLIEKIMQLCGIEKEYAIELANVSLQDDYGSLSAKAIKKILLYLKEGNQYDMACEYAGYRHSKSSLTKEEIENKVLKDKLEILPKNSLRNPVVEKILNQMVNVINTVMEVYGRPDEIRVELARELKKSAKEREELTKAVAKNTREHEEIRKVLQSEFGMINVSRNDIIRYKLYEELKDNGYKTLYSNQYIPREKLFSKEIDIEHIIPQSRLFDDSLSNKTLEYKSINIEKGNKTAYDFVKEKYGEEGLQQYLNRCENLCKDKKAKLRKLKMELNEIPDGFIDRDLRNTQYIAKKALSMLTEICRRVVATTGSITDKLREDWQLVDVMKELNLPKYEALGLVEVYEDKDGRKIKRIKDWTKRNDHRHHAMDALTVAFTKDVFIQYFNNKNAAWESDSKEHTNIVGIKTRYFESGKAVPPIPLGQFRVEAKCHLENLLVSIKAKNKVVTTNVNCIKKKGGTYKNTQQTPRGQLHLETIYGSHNQYVTKIEKVNASFDAVKIATVSKQDYRNALLKRLEVFGNDPKKAFTGKNSLEKNPIYLDRAQTIQVPDKVQTVELETAYTIRKPVDPTLNVDKVVDKKIRLILEQRLKEYGGDAKKAFVNLDENPIWLNEEKGISIKRVTIRGISKAQALHDKKDKDGNFILDETGKRIPVDFVNTGNNHHVAIYRKPVLDKKGQVIFDDEGNPMYELDEDVVPFFEAVTRANLGIPIIDKDYKKSEGWQFLFSMKQNEYFVFPNEKTGFNPKEVDLLDPDNYAMISPNLFRVQKIGLNDYTFRHHLETTIQNDLKFITWIRCGKSGIKDIVKVRINHIGQIVSVGEY

SEQ ID NO: 92 - protein, 984 aa, Campylobacter jejuni
MARILAFDIGISSIGWAFSENDELKDCGVRIFTKVENPKTGESLALPRRLARSARKRLARRKARLNHLKHLIANEFKLNYEDYQSFDESLAKAYKGSLISPYELRFRALNELLSKQDFARVILHIAKRRGYDDIKNSDDKEKGAILKAIKQNEEKLANYQSVGEYLYKEYFQKFKENSKEFTNVRNKKESYERCIAQSFLKDELKLIFKKQREFGFSFSKKFEEEVLSVAFYKRALKDFSHLVGNCSFFTDEKRAPKNSPLAFMFVALTRIINLLNNLKNTEGILYTKDDLNALLNEVLKNGTLTYKQTKKLLGLSDDYEFKGEKGTYFIEFKKYKEFIKALGEHNLSQDDLNEIAKDITLIKDEIKLKKALAKYDLNQNQIDSLSKLEFKDHLNISFKALKLVTPLMLEGKKYDEACNELNLKVAINEDKKDFLPAFNETYYKDEVTNPVVLRAIKEYRKVLNALLKKYGKVHKINIELAREVGKNHSQRAKIEKEQNENYKAKKDAELECEKLGLKINSKNILKLRLFKEQKEFCAYSGEKIKISDLQDEKMLEIDHIYPYSRSFDDSYMNKVLVFTKQNQEKLNQTPFEAFGNDSAKWQKIEVLAKNLPTKKQKRILDKNYKDKEQKNFKDRNLNDTRYIARLVLNYTKDYLDFLPLSDDENTKLNDTQKGSKVHVEAKSGMLTSALRHTWGFSAKDRNNHLHHAIDAVIIAYANNSIVKAFSDFKKEQESNSAELYAKKISELDYKNKRKFFEPFSGFRQKVLDKIDEIFVSKPERKKPSGALHEETFRKEEEFYQSYGGKEGVLKALELGKIRKVNGKIVKNGDMFRVDIFKHKKTNKFYAVPIYTMDFALKVLPNKAVARSKKGEIKDWILMDENYEFCFSLYKDSLILIQTKDMQEPEFVYYNAFTSSTVSLIVSKHDNKFETLSKNQKILFKNANEKEVIAKSIGIQNLKVFEKYIVSALGEVTKAEFRQREDFKK

SEQ ID NO: 93 - protein, 1082 aa, Neisseria meningitidis
MAAFKPNPINYILGLDIGIASVGWAMVEIDEDENPICLIDLGVRVFERAEVPKTGDSLAMARRLARSVRRLTRRRAHRLLRARRLLKREGVLQAADFDENGLIKSLPNTPWQLRAAALDRKLTPLEWSAVLLHLIKHRGYLSQRKNEGETADKELGALLKGVADNAHALQTGDFRTPAELALNKFEKESGHIRNQRGDYSHTFSRKDLQAELILLFEKQKEFGNPHVSGGLKEGIETLLMTQRPALSGDAVQKMLGHCTFEPAEPKAAKNTYTAERFIWLTKLNNLRILEQGSERPLTDTERATLMDEPYRKSKLTYAQARKLLGLEDTAFFKGLRYGKDNAEASTLMEMKAYHAISRALEKEGLKDKKSPLNLSPELQDEIGTAFSLFKTDEDITGRLKDRIQPEILEALLKHISFDKFVQISLKALRRIVPLMEQGKRYDEACAEIYGDHYGKKNTEEKIYLPPIPADEIRNPVVLRALSQARKVINGVVRRYGSPARIHIETAREVGKSFKDRKEIEKRQEENRKDREKAAAKFREYFPNFVGEPKSKDILKLRLYEQQHGKCLYSGKEINLGRLNEKGYVEIDHALPFSRTWDDSFNNKVLVLGSENQNKGNQTPYEYFNGKDNSREWQEFKARVETSRFPRSKKQRILLQKFDEDGFKERNLNDTRYVNRFLCQFVADRMRLTGKGKKRVFASNGQITNLLRGFWGLRKVRAENDRHHALDAVVVACSTVAMQQKITRFVRYKEMNAFDGKTIDKETGEVLHQKTHFPQPWEFFAQEVMIRVFGKPDGKPEFEEADTPEKLRTLLAEKLSSRPEAVHEYVTPLFVSRAPNRKMSGQGHMETVKSAKRLDEGVSVLRVPLTQLKLKDLEKMVNREREPKLYEALKARLEAHKDDPAKAFAEPFYKYDKAGNRTQQVKAVRVEQVQKTGVWVRNHNGIADNATMVRVDVFEKGDKYYLVPIYSWQVAKGILPDRAVVQGKDEEDWQLIDDSFNFKFSLHPNDLVEVITKKARMFGYFASCHRGTGNINIRIHDLDHKIGKNGILEGIGVKTALSFQKYQIDELGKEIRPCRLKKRPPVR

SEQ ID NO: 94 - protein, 1021 aa, Clostridium cellulolyticum
MKYTLGLDVGIASVGWAVIDKDNNKIIDLGVRCFDKAEESKTGESLATARRIARGMRRRISRRSQRLRLVKKLFVQYEIIKDSSEFNRIFDTSRDGWKDPWELRYNALSRILKPYELVQVLTHITKRRGFKSNRKEDLSTTKEGVVITSIKNNSEMLRTKNYRTIGEMIFMETPENSNKRNKVDEYIHTIAREDLLNEIKYIFSIQRKLGSPFVTEKLEHDFLNIWEFQRPFASGDSILSKVGKCTLLKEELRAPTSCYTSEYFGLLQSINNLVLVEDNNTLTLNNDQRAKIIEYAHFKNEIKYSEIRKLLDIEPEILFKAHNLTHKNPSGNNESKKFYEMKSYHKLKSTLPTDIWGKLHSNKESLDNLFYCLTVYKNDNEIKDYLQANNLDYLIEYIAKLPTFNKFKHLSLVAMKRIIPFMEKGYKYSDACNMAELDFTGSSKLEKCNKLTVEPIIENVTNPVVIRALTQARKVINAIIQKYGLPYMVNIELAREAGMTRQDRDNLKKEHENNRKAREKISDLIRQNGRVASGLDILKWRLWEDQGGRCAYSGKPIPVCDLLNDSLTQIDHIYPYSRSMDDSYMNKVLVLTDENQNKRSYTPYEVWGSTEKWEDFEARIYSMHLPQSKEKRLLNRNFITKDLDSFISRNLNDTRYISRFLKNYIESYLQFSNDSPKSCVVCVNGQCTAQLRSRWGLNKNREESDLHHALDAAVIACADRKIIKEITNYYNERENHNYKVKYPLPWHSFRQDLMETLAGVFISRAPRRKITGPAHDETIRSPKHFNKGLTSVKIPLTTVTLEKLETMVKNTKGGISDKAVYNVLKNRLIEHNNKPLKAFAEKIYKPLKNGTNGAIIRSIRVETPSYTGVFRNEGKGISDNSLMVRVDVFKKKDKYYLVPIYVAHMIKKELPSKAIVPLKPESQWELIDSTHEFLFSLYQNDYLVIKTKKGITEGYYRSCHRGTGSLSLMPHFANNKNVKIDIGVRTAISIEKYNVDILGNKSIVKGEPRRGMEKYNSFKSN

SEQ ID NO: 95 - protein, 1131 aa, Acidovorax ebreus
MAQHVFGLDIGIASVGWAILGEQRIIDLGVRCFDKAETAKEGDPLNLTRRQARLLRRRLYRRAWRLTQLSRLLKRKGLIADAKLFAKAPSYGDSAWELRRQGLDRLLTPLEWARVIYHQCKHRGFHWTSKAEEAKADSDAEGGRVKQGLAHTKALMQAKNYRSAAEMVLAEFPDAQRNKRGQYDKALSRVLLGEELALLFATQRRLGNPHASDFFEKLILGDGDRKSGLFWQQKPALSGADLLKMLGKCTFEKGEYRAPKASFSVERHVWLTRLNNLRIVVDGRSRPLNEAERQAALLLPYQTETSKYKTLKNAFIKAGLWGDGVRFGGLAYPSQAQIDAEKTKDPEDQFLVKLPAWHELRKAFKAAGHEALWQQISTPALDGDPTLLDQIATVLSVYKDGAEVVQQLRQLALPEPAASIAVLEKISFDKFSSLSLKALRRIVPLMQSGLRYDEAVAQIPEYGHHSQRIEPGAAKHLYLPPFYEAQRKYAGKGDHIGSMQFRDDADIPRNPVVLRALNQARKVVNALIREYGSPIAVNIEMARDLSRPLDERNKVKRAQEEFRDRNDRARSEFERDFGYKPKAAAFEKWMLYREQLGQCAYSQQPLDIQRVLDDHNYAQVDHALPYSRSYDDSKNNKVLVLTHENQNKGNRTAFEYLTSFPDGEDGERWRTFVAWVQGNKAYRMAKRNRLLRKNYGVDESKGFIDRNLNDTRYICKFFKNYVEEHLQLAARADGDTARRCVVVNGQLTAFLRARWGLTKVRGDSDRHHALDAAVVAACTHGMVKALADYSRRKEISFLQEGFPDPETGEILNPAAFDRARQHFPEPWTHFAHELKARLFTDDLAALREDMQRLGSYTTEDLGRLRTLFVSRAPQRRSGGAVHKETIYAQPESLKQQGGVIEKILLTSLKLQDFDKLLNPESNDHFVEPHRNERLYAAIRQRLEQFGGRADKAFGPDNLFHKPDKNNQPTGPVVRSIKLVRGKQTGIPIRGGLAKNDSMLRVDIFTKAGKFHLVPVYVHHRVTGLPNRAIVAFKDEDEWTLIDESFAFLFSVYPNDYVKVTLKKEQQSGYYSGADRSTGAMNLWAHDRAASVGKDGLIRGIGVKTALSVEKFNVDVLGRIYLAPPETRSGLA

SEQ ID NO: 96 - protein, 1122 aa, Streptococcus suis
MSNGKILGLDIGIASVGVGVIDAQTGEIIHASSRIFPSANAANNAERRTFRGSRRLIRRKKHRIKRLDDLFNDFHINLDGEMSTDNPYVLRVKGLSQKLTVEELYISIKNIMKRRGISYLDDAESDNEAGRSDYAKAIERNRQLLTSKTPGEIQLERLEKYGQLRGNFTIIDEEGQSQQIINVFSTSDYVKEVEKILDCQKMYHKFISDEFCDKLIELLREKRKYYVGPGNEKSRTDYGIYRTDGTTLENLFGILIGKCTFYPDQYRSSRASYTAQEFNFLNDLNNLTVPTETKKLSQEQKEFLVNYAKETSVLGAGKILQQIAKLADCKVEDIRGYRLDNKDKPELHTFETYRAMKGLVPLVDIGVLSREQLDILADILTLNTDFEGIREALKKQLPNVFDEKQVKGLASFRKSKSQLFAKGWHNLSQKIMLEVIPELYATSDEQMTILTRLGKFEKSSVAEYPSSINVDEITDEIYNPVVAKSIRQTIKIINASIKKWGEFDQIVIEMPRDRNEDEEKKRIADGQKANAKEKADSILRAAELYCAGKVLPDYVYNGHNQLATKIRLWYQQGERCIYTGQPISIHDLIHNQNQYEIDHILPLSLTFDDSLSNKVLVLATANQEKAQRTPYNYLKSATSAWSYREFKDYVTKRKGIGKKKCEYLTFEEDINGFEVRSKFIQRNLVDTRYASKVILNALQDYFKISGIQTKVSVVRGQFTSQLRHKWGIEKTRETYHHHAVDALIIAASSQLRLWKKQESPLVVDYQEGRQVDLETGEILELTDEQYKELVYQPPYQGFVNTISSSAFDNEILFSYQVDSKVNRKISDATIYATRNAQLGKDKTEGIYVLGKIKDIYTQAGYEAFLKRYTKDKTSFLMYHKDLDTWEKVIEIILRDYREYDEKGKEIGNPFERYRRENGYVKKYSRKGNGTAIKSLKYYDNKLGNHIDITPENSRNAVVLQSLKPWRTDVYFNKETGKYEFLGIKYSDLSFEKGTGEYGISQEKYDSIKIAEGVAKKSIFKFTLYKQDLLFIKDIENNFGKLLRFTSKNDTSKHYVELKPYDKNKFGTEEPLLPVLGNVAKSGQCIKGLNKSNISIYKVRTDILGYRHFIKQEGEHPQLKFKK

SEQ ID NO: 97 - protein, 1509 aa, Bacteroides coprophilus
MKKTLGLDLGTNSIGWAVINSNIDSEGKEKLVGISSCGSRIIPMDATTLGDFGKGNTKSPVAERTRLRGIRRLLERSLLRRERLHRVLSVMGFLPEHYASQLDRYGKFLPETEPKLAWYKDDSGRYQFLFQKSFHEMLEDFRQHQPELVAGEKKIPYDWTIYYLRKKALSQEITKEELAWILLNFNQKRGYYQLRGEEEQEENNKSVEYHALKVVSVEDSGERKGKDIWYNVTLENGWVYRRASNIPLDWTGKVKEFVVTTELDDAGNPKKDKEGNVKRSFRAPKEDDWGLLKTRTQAQIDESGKTVGTYIYESLLCMPNQKIRGKLVRTIERKYYKDELRQILVKQSEFHAALQDHNLLLSCIEELYPNNEAHRRLLSASSFIYFLIEDILFYQRPLKSQKGLIDNCPYESHIYKDKKDGSLHHVPLKCVSKSHPLFQEFRLWQFLSNLRIYQRERMMDGSLKLDVDVTREFLPSEEDYVKLFDWLNERKEISQKFLLAYKPFGLKKNEQANYRWNYVEDKSYPCNETRAEIKSRLSKAGVPEEFLTEEKEEALWHILYSISDKKELTKALGTFAAKNCLNESFVEVFAKIPPFESNYAAYSLKAIRKLLALMRMGKYWNEQAIDRQTRDRIEKILTGEYDETIRSRVREKAMLLTDISSFRGLPLWLACYIVYDRHSESKELVKWETPADIDHFLSKFKQNSLRNPIVEQVITESLRTVRDIWKQEGKIDEIHVELGREMKNPAKERARITAQVQENENTNLRIKALLAEFMNPEFEIENVHPYSPGQQEILRIYEDGVLSGIAEKDLPDDITAILKKFRENDVKKRPTTSEVLRYKLWLEQRYRSPYTGRVIPLGKLFTPAYEIEHVIPQSRYFDDSISNKVICESAVNKLKDNCLGYEFIKKHSGEMVELGNGETVPVFSVEEYERFVKESYFGNSKKMKKLLLEDIPDSFIERQLNDSRYISRVVTSLLSNLVCEEGEQDGLSKNVIVCTGGITDRLKKDWGVQEVWNRIILPRFLRLNEITGRTDFTSTSVNGHLLPALPLYLQKGFNKKRIDHRHHAMDAIVIACANRNIVNYLNNSSARKNSEISRYDLQRLLCEKVKTDANGNYKWILRKPWETFTQDVYAALTNIVVSFKQNLRVINRTTNYYQHYNEAGEKRMIPQTKGDRWAIRKPMHKDTVYGEVNLRKEKTLPLRDVVKNPSIVVDKSLKNKLYELLKSQYDLKAIAKYFETHQDVWADVNLKKIKVYYFTKETNERFFATRKSLDPSFDQKKIEEEVTDTGVQKILLHHLQQNNNDPDMAFSPDGIDRMNQNMTILNDGKWHQPIYKVRTYEKADKFAVGESGNKAKKFVEAAKGTNLFFAVYESVQEDEAIGKQVCKRTFATIPLNEVIKRKKQGLPAAPEDLNGNLPKFVLSPNDLVYLPTEEERNSSRIIQPLDRERIYKMVSSSGSQCFFIKVFVANSIWDKNEYSSLNKMERAITNEMIKEICVPIKIDRLGNVSLIQI

SEQ ID NO: 98 - protein, 1219 aa, Bacteroides cellulosilyticus
MKEEVRGKNRSQTWAILAKFFVWSEKESVWNEKEARTEERVKEYKLVGLKRDTKGNELKLENYRWRVQALSEQLNPEIVAIVLQEINGQISASSGYLGAISDRSKQLYFNRQTVGQYLMSELEKDPNVSLRNRVFYRQDYLDEFDRIWEKQAEFHEELTVELKKEIRDIIIFYQRRLKSQKGLISFCEFEKREVVVEEDGRKKNKTVGCRVIPRSHPLFQEFKIWQTLNDIEVFAWDKQSKRKKADKSSILFDNSEDALLVEGKRFLYQEEKELLAKELFVKESMKKAEVLKLLFENYQELDLNFKQIDGNHTGFALFSAYSKMIEKYGYEPVDFKRSADEIIEKLETIFTNLGWNTELLSIDLSKEDKELERQSYFRLWHLLYSFEGDNTPTGNGKLLEKIMQLCDVEKEYAVELANVSFQEDYGSLSAKAIKKILPYLKEGNQYDVACDYAGYRHSRSSLTKDEIENKILKDKLEILPKNSLRNPVVEKILNQMVNLINTLIDTYGKPDEIRVELARELKKNAKEREELTKSIARNTREHDEIRQLLRTEFGMMNVSRNDIIRYKLYEELKDNGYKTLYSNEYIPREKIFSKEIDIEHVIPQARLFDDSLSNKTLEYRAINIEKGNKTAYDFVKEKYGNDGLEKFLNRCETLFKDKRTKLRKLKMEEKDIPEGFIDRDLRNTQYISKKAFAMLNEISRRVVATTGSITDKLREDWQLVDLMKELNLPKYEKLGMVEMFEDKDGRKIKKITDWTKRNDHRHHAVDALTVAFTKDVFIQFYNNKNAAWMPASKEHANITGIKARYFENGKALAPMPLAQFRAEAKRHLENLLVSIKAKNKVITSNVNRTKNKNGENRKLQQTPRGQLHLETVYGSHRQYATKIEKVNAAFDVTKIATVSKLAYRNALLKRLEAFGNDPKKAFTGKNTLEKNPLYLDENQTEMVPEKVQTVEFETVYTIRKPIDPNLSIDKVVDVKIRSVLEKRLKEYGGDAKKAFVNLDENPIWLNEAKGISIKRVSIRGISNAQSLHEKKDKDGNLILGKEGRKIPVDFVNTGNNHHVAIYKKPVLDKVGQVVLDEEGNPKYELDEVVVSFFDAVTRANLGQPIIDKDYRRSEGWQFLFSMKQNEYFVFPNDKTGFNPKEVDLLNPENYALISPNLFRVQKFAYKNYVFRHHLETTIKDTSSTLKGITWTDFRSSKGLDKIVKVRVDHIGQIVSIGEY

SEQ ID NO: 99 - protein, 1329 aa, Catenibacterium mitsuokai
IVDYCIGLDLGTGSVGWAVVDMNHRLMKRNGKHLWGSRLFSNAETAANRRASRSIRRRYNKRRERIRLLRAILQDMVLEKDPTFFIRLEHTSFLDEEDKAKYLGTDYKDNYNLFIDEDFNDYTYYHKYPTIYHLRKALCESTEKADPRLIYLALHHIVKYRGNFLYEGQKFNMDASNIEDKLSDIFTQFTSFNNIPYEDDEKKNLEILEILKKPLSKKAKVDEVMTLIAPEKDYKSAFKELVTGIAGNKMNVTKMILCEPIKQGDSEIKLKFSDSNYDDQFSEVEKDLGEYVEFVDALHNVYSWVELQTIMGATHTDNASISEAMVSRYNKHHDDLKLLKDCIKNNVPNKYFDMFRNDSEKSKGYYNYINRPSKAPVDEFYKYVKKCIEKVDTPEAKQILNDIELENFLLKQNSRTNGSVPYQMQLDEMIKIIDNQAEYYPILKEKREQLLSILTFRIPYYFGPLNETSEHAWIKRLEGKENQRILPWNYQDIVDVDATAEGFIKRMRSYCTYFPDEEVLPKNSLIVSKYEVYNELNKIRVDDKLLEVDVKNDIYNELFMKNKTVTEKKLKNWLVNNQCCSKDAEIKGFQKENQFSTSLTPWIDFTNIFGKIDQSNFDLIENIIYDLTVFEDKKIMKRRLKKKYALPDDKVKQILKLKYKDWSRLSKKLLDGIVADNRFGSSVTVLDVLEMSRLNLMEIINDKDLGYAQMIEEATSCPEDGKFTYEEVERLAGSPALKRGIWQSLQIVEEITKVMKCRPKYIYIEFERSEEAKERTESKIKKLENVYKDLDEQTKKEYKSVLEELKGFDNTKKISSDSLFLYFTQLGKCMYSGKKLDIDSLDKYQIDHIVPQSLVKDDSFDNRVLVVPSENQRKLDDLVVPFDIRDKMYRFWKLLFDHELISPKKFYSLIKTEYTERDEERFINRQLVETRQITKNVTQIIEDHYSTTKVAAIRANLSHEFRVKNHIYKNRDINDYHHAHDAYIVALIGGFMRDRYPNMHDSKAVYSEYMKMFRKNKNDQKRWKDGFVINSMNYPYEVDGKLIWNPDLINEIKKCFYYKDCYCTTKLDQKSGQLFNLTVLSNDAHADKGVTKAVVPVNKNRSDVHKYGGFSGLQYTIVAIEGQKKKGKKTELVKKISGVPLHLKAASINEKINYIEEKEGLSDVRIIKDNIPVNQMIEMDGGEYLLTSPTEYVNARQLVLNEKQCALIADIYNAIYKQDYDNLDDILMIQLYIELTNKMKVLYPAYRGIAEKFESMNENYVVISKEEKANIIKQMLIVMHRGPQNGNIVYDDFKISDRIGRLKTKNHNLNNIVFISQSPTGIYTKKYKL

SEQ ID NO: 100 - protein, 1152 aa, Roseburia inulinivorans
MNAEHGKEGLLIMEENFQYRIGLDIGITSVGWAVLQNNSQDEPVRITDLGVRIFDVAENPKNGDALAAPRRDARTTRRRLRRRRHRLERIKFLLQENGLIEMDSFMERYYKGNLPDVYQLRYEGLDRKLKDEELAQVLIHIAKHRGFRSTRKAETKEKEGGAVLKATTENQKIMQEKGYRTVGEMLYLDEAFHTECLWNEKGYVLTPRNRPDDYKHTILRSMLVEEVHAIFAAQRAHGNQKATEGLEEAYVEIMTSQRSFDMGPGLQPDGKPSPYAMEGFGDRVGKCTFEKDEYRAPKATYTAELFVALQKINHTKLIDEFGTGRFFSEEERKTIIGLLLSSKELKYGTIRKKLNIDPSLKFNSLNYSAKKEGETEEERVLDTEKAKFASMFWTYEYSKCLKDRTEEMPVGEKADLFDRIGEILTAYKNDDSRSSRLKELGLSGEEIDGLLDLSPAKYQRVSLKAMRKMQPYLEDGLIYDKACEAAGYDFRALNDGNKKHLLKGEEINAIVNDITNPVVKRSVSQTIKVINAIIQKYGSPQAVNIELAREMSKNFQDRTNLEKEMKKRQQENERAKQQIIELGKQNPTGQDILKYRLWNDQGGYCLYSGKKIPLEELFDGGYDIDHILPYSITFDDSYRNKVLVTAQENRQKGNRTPYEYFGADEKRWEDYEASVRLLVRDYKKQQKLLKKNFTEEERKEFKERNLNDTKYITRVVYNMIRQNLELEPFNHPEKKKQVWAVNGAVTSYLRKRWGLMQKDRSTDRHHAMDAVVIACCTDGMIHKISRYMQGRELAYSRNFKFPDEETGEILNRDNFTREQWDEKFGVKVPLPWNSFRDELDIRLLNEDPKNFLLTHADVQRELDYPGWMYGEEESPIEEGRYINYIRPLFVSRMPNHKVTGSAHDATIRSARDYETRGVVITKVPLTDLKLNKDNEIEGYYDKDSDRLLYQALVRQLLLHGNDGKKAFAEDFHKPKADGTEGPVVRKVKIEKKQTSGVMVRGGTGIAANGEMVRIDVFRENGKYYFVPVYTADVVRKVLPNRAATHTKPYSEWRVMDDANFVFSLYSRDLIHVKSKKDIKTNLVNGGLLLQKEIFAYYTGADIATASIAGFANDSNFKFRGLGIQSLEIFEKCQVDILGNISVVRHENRQEFH

SEQ ID NO: 101 - protein, 686 aa, Coprococcus comes
MKKQDSPKNNMGYTAYNLNVLGYEEFAKRVELLFKDTDAVKRLNDSHMQMAEGFDLNALPGSPALRRGVSQAIKVLDDIVSVAGKAPDRIYLKVTRTASNSRKGKRTAKRSDKIKQALKALDADAAADLGAAKLLRELGMFDEKEINERIYLYFHQAGKCLYTGKPIDITRIASNDYYVDHVVPLAYRKDESLDNKVLVYAEASRYKSETLLVSPAVQRKMLPFWRMLRNAGLMSERKLNALIRTEISEGMLKSIIGRQFTENSWEAKLFTAAIAAKYPGTVVIPVKAGVIGAVRSRIGIPKSLKANQFYHAHDALLAAEVGRYMELAKPAFVHNRVKYEQYMRKIKLVNEENKKAPKSQLDFFAGGFFFDRVDKDTGEVYWNKDEEVERIYRACGWKNLRVTYAAFEDGGAFWKQTIYSPREKSKLIATKSDRPAEIYGGYSSQTFANFFVYEVMKKKVKQLRFGAVPAAIASKSDPDTYNAMLEMYARGLAKTAKEKFVRIVRARVLKNTMIELYGERFRIAGEKQVYPVRQMPLAIDEVYLLKGVETIAAAGNAGASAKIDFEKAAESLVGFWDLLLEKLPVNYPKLTVQLKLGLLKHPKDILAATSESEFPAIVYKIAEAEIQVMEQASGLRNMSDTKILGGNTFGGSLVFTFNKVLNDPKSKACFIDTTPAGLYEVKTKIW

SEQ ID NO: 102 - protein, 1105 aa, Actinomyces coleocanis
MDNKNYRIGIDVGLNSIGFCAVEVDQHDTPLGFLNLSVYRHDAGIDPNGKKTNTTRLAMSGVARRTRRLFRKRKRRLAALDRFIEAQGWTLPDHADYKDPYTPWLVRAELAQTPIRDENDLHEKLAIAVRHIARHRGWRSPWVPVRSLHVEQPPSDQYLALKERVEAKTLLQMPEGATPAEMVVALDLSVDVNLRPKNREKTDTRPENKKPGFLGGKLMQSDNANELRKIAKIQGLDDALLRELIELVFAADSPKGASGELVGYDVLPGQHGKRRAEKAHPAFQRYRIASIVSNLRIRHLGSGADERLDVETQKRVFEYLLNAKPTADITWSDVAEEIGVERNLLMGTATQTADGERASAKPPVDVTNVAFATCKIKPLKEWWLNADYEARCVMVSALSHAEKLTEGTAAEVEVAEFLQNLSDEDNEKLDSFSLPIGRAAYSVDSLERLTKRMIENGEDLFEARVNEFGVSEDWRPPAEPIGARVGNPAVDRVLKAVNRYLMAAEAEWGAPLSVNIEHVREGFISKRQAVEIDRENQKRYQRNQAVRSQIADHINATSGVRGSDVTRYLAIQRQNGECLYCGTAITFVNSEMDHIVPRAGLGSTNTRDNLVATCERCNKSKSNKPFAVWAAECGIPGVSVAEALKRVDFWIADGFASSKEHRELQKGVKDRLKRKVSDPEIDNRSMESVAWMARELAHRVQYYFDEKHTGTKVRVFRGSLTSAARKASGFESRVNFIGGNGKTRLDRRHHAMDAATVAMLRNSVAKTLVLRGNIRASERAIGAAETWKSFRGENVADRQIFESWSENMRVLVEKFNLALYNDEVSIFSSLRLQLGNGKAHDDTITKLQMHKVGDAWSLTEIDRASTPALWCALTRQPDFTWKDGLPANEDRTIIVNGTHYGPLDKVGIFGKAAASLLVRGGSVDIGSAIHHARIYRIAGKKPTYGMVRVFAPDLLRYRNEDLFNVELPPQSVSMRYAEPKVREAIREGKAEYLGWLVVGDELLLDLSSETSGQIAELQQDFPGTTHWTVAGFFSPSRLRLRPVYLAQEGLGEDVSEGSKSIIAGQGWRPAVNKVFGSAMPEVIRRDGLGRKRRFSYSGLPVSWQG

SEQ ID NO: 103 - protein, 1361 aa, Anaerococcus tetradius
MGNYYLGLDIGTNSVGWAVTDENYNIERFKKKNMWGIRLFDEAKTAESRRIHRQARRMRQRKIQRLNLLMELFDVEISKVDESFFIRKKESDLHYEDKSQDSRYALFNDKEFNDKDYHNKYPTIFHLIMDLIENDEKKDIRLLYLACHYLIKNRGHFIFEGQKFDVNSSLNNNINKLKSHLDQFYNICLDFDNDKLIEILVNQNLNISEKSKKIKELLRKTNLEVGIANLIAGGSIKLSNMFDDDELKNLDYNSLSFKNSNFDEGRELFEEVLEDRFELVEILKDIHDASVLETMLSSASISPDGGKYISSSMINSYNKHKRDLKLLKKIIKKYKKSEYDNIFRDENIKNNYLSYTRTGINKNKKVQAEDNTDSDGFYKYIVKILKDIKENDSDEDIKYILSEIDKKNFVPKQRTKENSVIPYQLREIELRKIIDNQSKYHKFLNEVDEKGISVKEKIISLLTFRIPYYIGPLNPSYNEEKNFTTSWVKRLAKGKVTPWNFEDMVDIDASREAFIENKLNKCSFLLDETVLPKDSLLYQEYMVLNELNNLKINGQSINTDLKKSIYEELFKKYKKVTRKRLISYIKEKENMSGDIVITGIDGDFKQGLKSYIAFKDIIGEKIDDDIYRKEVEKIIRDISLYGDDKSFIQKKIKNENKLDLSDDQISKIAKLKFKDWGRFSKKLLVGIKASDKNTGEIDNIIGFMRNYNYNIMQLMANVFTFKDEIEKLNSKYYTDEKINIDYLDDLYLSSPAKRMLWQSFQIVDEIKNIKNSDPKKIFIEMARSKEDKPTRKMSRKSRLEKLYTDSKKQFIKLFGPDEYDKLNNEIKNKSESDFRWDNLYLYYTQFGRCMYSLDPIDLEELSNKNLYDQDHIYPKSKIYDDSIENRVLVKKQLNLDKSNEYPIPDRVLNKDKNKLLAFWKMLNEKELIGDKKYARLIRKSPFTDEELGDFIARQLVETRQATKETANMLKRLCPDSKIVYVKAKNVSDFRRKFDILKCRSINDLHHAHDAYLNIVVGNVFDTKFTSNPLNFIKNNSKNRSYNLEKIYDYDVIRNEKIAWLAERKEENQDGSIATVLKNLSKNDIRVTRRTYIKCEDLFDENIVRKGNGKFPIKENNNKSDTNKYGGYSGIKNAYFVLLEDEKHNRILEAIPSFIYKKEKNGEKGSVINYLQNILGIKSAKILRDKIKIGSLLKIDKFPYNLAGKSGNGILISGGVQLILDKNTSKYIKKIENYKYKLDENKDYQINIFDKLSKEENIKLFDLFVDKFENSIYKNRVNIKLKEIKLARPKFEHLSIEEQIKTLTQMLILFGRENNAVNLEYIGLPKNTGKTKINKKINNKDIKIINQSITGLYETEEDLANI

SEQ ID NO: 104 - protein, 1377 aa, Lactobacillus brevis
MESNHDGEQVKYTLGLDIGTSSIGYAAIDKHQKPIRAKGKHVIGVRLFQEGQTAADRRAFRTTRRRLKRRKWRLNLLNRLFDPYLSEVDPNFLPRLRQSNLSPKDDNKHFNGSTLFPDKTDAAFYRQYPTMYHLRYALMTEKRKFDIREVYLAIHHIVKYRGNFLNSATVDSFKTSNIDFTSQFDRLNELYRQVILDEPFQINMDQVDEMTNKLLDNDALKLDTQKQVAKLLPVIYNDKPIDKQYTRIATEFSKAILGYKTKLDVILNLDTQNAKDWVIRLDDEDIDDKLPALVENLDESRQEIVTIIRDLYAQITLNAIVPKGKSLSESMVDKYNDHKDHLDLLMGLIHELGDDSAKGIKLREAYTQYVGKSDDKTLNQDDFYAAIKKNLDEDSKRSPKIQRLIEQASFMPKQRTSANGVIPHQLHQLELDRIIENQGRYYPFLKKPNPNTHKPNGGKYKLDELVAFRIPYYVGPLITKRDQEKTSGADFAWMIRKPGQEGEITPWNFDQKVDRMASANRFIRRMTTKDSYLVAEDVLPDASLIYEKFKALNELNMLKVNDSRLSPSQKQDLFNNLFKKQKTIRTKKLQTYIRTNWELPSVMISGLADPDKFNSSLSTYIDFRDIFGEKVDDPNRQADYEEIIEWSTVFEDRKIYQAKLNQLDWLTEPQRKALLTKRYTGWGRLSKKLLTGLKDQNGDSILDQLWKTNDNFMQIQSRDEFAKQIHDENAKQFHEANNVDDILDDAFTSPQNKKAIRQVDKVVQDVVKAVGYAPDKIAIEFTRSLENNPQRTVSRQRQLQAAYKNIPREIMKSGLMAELGSVADSKKVLSDKLYLYFTQMGKDMYEDKTINIDNLPNYDIDHILPQAFIKDDSIDNRVLISKEENARKSNRVPLKFFGAKRMGFWKDLLNNGLISNRKFQNLTTDPEKISKYSAKGFIHRQLVETSQVIRLVANILGNEYSQAGTTIIEVSAKMNRQLREDFHLIKNRNVNDYHHAMDAYLTAYVGDYLYLRYPKLRPYFVYGDFKKAEDQDLNIRNFNFLHDLKDNESLDKIVDSETGEIVWEKHGSVKQLKKVYHYKFMLVSQEVYTRQDALFNQTIYPASDADKRKLIPIKNSKPVDVYGGYSGNIDAYMAIVRVHGKKEDNYKVVGIPMRAVTKLKKAEKEGHDSYLNAVHEVLKPQFTKKKKNRKTGEITETVDEFDVLLGKVYYRQLIVDGNKKFMLGSSSYQYNAKQLVLSDKAMQVLSKNGKVKSQDENQNLIDVYDEILEKVDQYFELYDQRHYRESLHKGRGIFVNLPLSNQYDGSKLTSYGKYETIDAILNGLHANATMSNLRYLGISSPFGKMQASNGLTIDPDSIICYQSPTGLFERQIKLSDL

SEQ ID NO: 105 - protein, 1239 aa, Lactobacillus buchneri
MTEKRKFDIREVYLAIHHIVKYRGNFLNSATVDSFKTSNIDFTSQFDRLNELYRQVILEEPFQINMNQVDKMTNKLLDNDALKLDTQKQVAKLLPVIYNDKPVDKQYTRLATEFSKAILGYKTKLDVILNLDTQNAKDWAIRLDDEDIDDKLPALVENLDESRQEIVTIIRDLYAQITLNAIVPKGKSLSESMVDKYNDHKDHLDLLMGLIHELGDDSAKGIKLREAYTQYVGKSGDKTLNQDDFYAAIKKNLDEDSKRSPKIQRLIEQASFMPKQRTSANGVIPHQLHQLELDRIIENQGRYYPFLKEPNSNTHKPNGGKYKLDELVAFRIPYYVGPLITKQDQEKTSGADFAWMIRKPGQGGEITPWNFDQEVDRMASANTFIRRMTTKDSYLVAEDVLPDSSLIYEKFKVLNELNMLKVNDRRLSISQKQDLFNNLFKKQKTIRTKKLQTYIRTKWELPSVMISGLSDPDKFNSSLATYIDFRDVFGEKVDDPNRQADYEKIIEWSTVFEDRKIYQAKLNQLDWLTESQSKALLTKHYTGWGRLSKKLLTGLKDQNGDSILDQLWKTNDNFMQIQSRDEFAKQIHDENAKQFHEANNVDDILDDAFTSPQNKKAIRQVDKVVQDVVKAVGYAPDKIAIEFTRSPQDRPQRTFSRQRQLQSTYLNVAKALMKSNLNQELKSVIDSQQTLTDKLYLYFTQLGQDMYTGKEINFDELVNYQIDHILPQAFIKDDSLDNRVLVSAPINNAKSDNVPVKKFGAKMGYFWKQLAENHLISKRKLNNLTTDPDKIGKFTAQGFIHRQLVETSQVIRLVANILGNEYGHDGTTIIEVTAKMNHQMRKDFDLIKIRDVNDYHHAMDAYLTAYVGDYLYLRYPKLRSYFVYGDFKKLKDQSLKIRNFNFLHDLTNDEAGDKIVDQETGEIIWDKHESVKQLKKVYHYKFMLVSQEVYTRQDALFNQTIYPASDADKRKLIPIKNNKPVDVYGGYSGNVDAYMAIVRIHGKKEDKYKVVGVPMRAVADLKKAESKGRDNYLNAVHEVLKPQFTKKKKDRKTGEITEMMDDFDVLLGKVYYRQLIVDGNKKFMLGSSTYQYNAKQLVLSDKAMQVLSKDDKLKNQDENQNLIDVYDEILEKVDQYFELYDINKFRQKLHDGRKKFIELPVDNDFNGKKLISYGKRATIISILNGLHANATMSNLKYLGISSPFGMLQVPNGIILSPASRICYQSPTGLFERKVKLSDL

SEQ ID NO: 106 - protein, 1381 aa, Lactobacillus fermentum
MDYVKEYHIGLDIGTSSIGWAVTDSQFKLMRIKGKTAIGVRLFEEGKTAAERRTFRTTRRRLKRRKWRLHYLDKIFAPHLQEVDENFLRRLKQSNIHPEDPAKNQAFIGKLLFPDLLKKNERGYPTLIKMRDELPVEQRAHYPVTNIYKLREAMINEDRQFDLREVYLAVHHIVKYRGHFLNNASVDKFKVGRIDFDKSFNVLNEAYEELQNGEGSFTIEPSKVEKIGQLLLDTKMRKLDRQKAVAKLLEVKVADKEETKRNKQIATAMSKLVLGYKADFATVAMANGNEWKIDLSSETSEDEIEKFREELSDAQNDILTEITSLFSQIMLNAIVPNGMSISESMMDRYWTHERQLAEVKEYLATQPASARKEFDQVYNKYIGQVPKEKGFDLEKGLKKILSKKENWKEIDELLKAGDFLPKQRTSANGVIPHQMHQQELDRIIEKQAKYYPWLATENPATGERDRHQAKYELDQLVSFRIPYYVGPLVTPEVQKATSGAKFAWAKRKEDGEITPWNLWDKIDRAESAEAFIKRMTVKDTYLLNEDVLPANSLLYQKYNVLNELNNVRVNGRRLSVGIKQDIYTELFKKKKTVKAGDVASLVMAKTRGVNKPSVEGLSDPKKFNSNLATYLDLKSIMGDKVDDNRYQMDLENIIEWRSVFEDGEIFADKLTEVEWLTDEQRSALVKKRYKGWGRLSKKLLTGIVDENGQRIIDLMWNTDQNFMQIVNQPVFKEQIDQLNQKAITNDGMTLRERVESVLDDAYTSPQNKKAIWQVVRVVEDIVKAVGNAPKSISIEFARNEGNKGEITRSRRTQLQKLFEDQAHELVKDTSLTEELEKAPDLSDRYYFYFTQGGKDMYTGDPINFDEISTKYDIDHILPQSFVKDDSLDNRVLVSRAENNKKSDRVPAKLYAAKMKPYWNQLLKQGLITQRKFENLTMDVDQNIKYRSLGFVKRQLVETRQVIKLTANILGSMYQEAGTDIIETRAGLTKQLREEFDLPKVREVNDYHHAVDAYLTTFAGQYLNRRYPKLRSFFVYGEYMKFKHGSDLKLRNFNFFHELMEGDKSQGKVVDQQTGELITTRDEVAKSFDRLLNMKYMLVSKEVHDRSDQLYGATIVTAKESGKLTSPIEIKKNRPVDLYGAYTNGTSAFMTIIKFTGNKPKYKVIGVPTTSAVGLKRVGKPGSESYNQELHRIIKSNPKVKKDFEIVVPHVSYSQLIVDGDCKFTLASDTYQHPATQLVLSKESMEIIADDFKFVKENPATADEQLVRVFDEIVNQMNHYFTIFDQRSNRQKVTKARDKFVSLPTESEYEGAKKTQVGKTEVITNLLMGLHANAAQGDLKVLGLSTFGFFQSSGGLNLSEDAMIVYQSPTGLFERRICLKDI

SEQ ID NO: 107 - protein, 1306 aa, Sphingobacterium spiritivorum
MKHILGLDLGTNSIGWALIKQNFENKQGEILGMGSRIIPMGAELSKFEQGQAQTKNANRRIARGTRKLNKRYKQRRNKLIYILQGLGMLPDQIKLVNQFSDPNKLDKISILPISKNQQQLTAFDLLELRVKALTEKIELEELGKVIYKYNQLRGYSGGNSEPEKEENNEDESEENEKTNDSFVVFSKVLSLGLPEEITFKGKKLSKRKIAIETEDGIIEAETFLDSLKENDSLELHVNIRRAKSGDTITIKLPSKTSWRKKMENIEKQLADKSKELGREYFISELLFDILKENKWAKIRNNVILRSRYESEFDAVWSEQSKYYPILNHLETDRLQKILEFIFPGQKESQEKLRQTGLKEGLKYVIKNQVVFYQRELKDQSDLISNCRYEPTEKVVAKSHPVFQEYKIWEQINKLVINTKIENGVNRKGEIRYKYIDKPIPVALKEWLYEELQSKKEVSFNPILTKLKKEFKLRENVDFLNGMNAKDKLKGNETKVILQKALGELWNIFGLDDSERQVELWEILYNGKGNEYDLTSERTSNILAFIEKYSPDLENKNDVAIKISKIKFSRNYSNLSLKAIDNILPLVRAGKFFDQNFSEALSHKIVKLLNENVEDPFEKSAQEFLDKNQDVLSDGGIVNAIATILVYDKHTAKEYSGDELIKEFTQISRLKQGELRNPLAEQIINEALVIVRDIWRKYGFKPDEIRVELARELKNNAVERGKMYSANLKSQKHNAEIRNKLIELKQEISIANIEKYKLWVSQENLQEVYLKNYNDPSKSEIEKLKLWESQGHISPYTGQPISLSELFNRERYDVDHIIPQSRYFDDSLSNKVICEKSINNEKGNRTSMEYFEVGSVNYRIFTKDQFIDHANKYFSGKKRKNLLATSIPEDPIQRQIKDTQYISIRIREELNKIVGNENVKTTTGGITDYLRNHWGLTDKFKVLLKERYEAVLPKIAQLEYDNYKKETEKKFTEYKNADVEFNEPILDEEIFIEKFRSEFIRKKNNKLIIKGWSKRIDHRHHAMDALVIACTQPAHIKRLNDLNQVLKEWLDKNKEKFFPGFSGTKTELLDEVLNLEEEKRREIFNQLEKFRAIEMPWKGFPEEAEQKLKEVIVSHKPKDKLLLQYDIQGNKQIKLRGQLHEGTLYGLSNGKEIYRIPINKLAGKQFATEKTIEKIVNPFLKNVIEEHLKSFGKKEEAFSAEGILDLNKKLAERKDEQQNPKPHPPISTIKIYYKDPSKSKKKKTDDEDDISLQKLNRKKSFNDSLYVKTGDNYLFAVMEKEVFNKKLNKDKTERHYDLKLFLTLLIF

SEQ ID NO: 108 - protein, 1358 aa, Acidaminococcus sp.
MGKMYYLGLDIGTNSVGYAVTDPSYHLLKFKGEPMWGAHVFAAGNQSAERRSFRTSRRRLDRRQQRVKLVQEIFAPVISPIDPRFFIRLHESALWRDDVAETDKHIFFNDPTYTDKEYYSDYPTIHHLIVDLMESSEKHDPRLVYLAVAWLVAHRGHFLNEVDKDNIGDVLSFDAFYPEFLAFLSDNGVSPWVCESKALQATLLSRNSVNDKYKALKSLIFGSQKPEDNFDANISEDGLIQLLAGKKVKVNKLFPQESNDASFTLNDKEDAIEEILGTLTPDECEWIAHIRRLFDWAIMKHALKDGRTISESKVKLYEQHHHDLTQLKYFVKTYLAKEYDDIFRNVDSETTKNYVAYSYHVKEVKGTLPKNKATQEEFCKYVLGKVKNIECSEADKVDFDEMIQRLTDNSFMPKQVSGENRVIPYQLYYYELKTILNKAASYLPFLTQCGKDAISNQDKLLSIMTFRIPYFVGPLRKDNSEHAWLERKAGKIYPWNFNDKVDLDKSEEAFIRRMTNTCTYYPGEDVLPLDSLIYEKFMILNEINNIRIDGYPISVDVKQQVFGLFEKKRRVTVKDIQNLLLSLGALDKHGKLTGIDTTIHSNYNTYHHFKSLMERGVLTRDDVERIVERMTYSDDTKRVRLWLNNNYGTLTADDVKHISRLRKHDFGRLSKMFLTGLKGVHKETGERASILDFMWNTNDNLMQLLSECYTFSDEITKLQEAYYAKAQLSLNDFLDSMYISNAVKRPIYRTLAVVNDIRKACGTAPKRIFIEMARDGESKKKRSVTRREQIKNLYRSIRKDFQQEVDFLEKILENKSDGQLQSDALYLYFAQLGRDMYTGDPIKLEHIKDQSFYNIDHIYPQSMVKDDSLDNKVLVQSEINGEKSSRYPLDAAIRNKMKPLWDAYYNHGLISLKKYQRLTRSTPFTDDEKWDFINRQLVETRQSTKALAILLKRKFPDTEIVYSKAGLSSDFRHEFGLVKSRNINDLHHAKDAFLAIVTGNVYHERFNRRWFMVNQPYSVKTKTLFTHSIKNGNFVAWNGEEDLGRIVKMLKQNKNTIHFTRFSFDRKEGLFDIQPLKASTGLVPRKAGLDVVKYGGYDKSTAAYYLLVRFTLEDKKTQHKLMMIPVEGLYKARIDHDKEFLTDYAQTTISEILQKDKQKVINIMFPMGTRHIKLNSMISIDGFYLSIGGKSSKGKSVLCHAMVPLIVPHKIECYIKAMESFARKFKENNKLRIVEKFDKITVEDNLNLYELFLQKLQHNPYNKFFSTQFDVLTNGRSTFTKLSPEEQVQTLLNILSIFKTCRSSGCDLKSINGSAQAARIMISADLTGLSKKYSDIRLVEQSASGLFVSKSQNLLEYL

SEQ ID NO: 109 - protein, 653 aa, Oribacterium sinus
MELINSEEFTFKEELEKHTQVAMKQLSEFTYEDLEDSYFSVPVKRMIWQTLLVVREIEKVMGYAPKRIFVEMTRTEEEKGDKGRKESRGNQLLELYKSIKNTDSHNWKEEIAAADKDGKLRSKKLFLYYMQMGRDMYTGEEIDLGRLYDDNLYDIDHIYPRHYVKDDSIMNNLVLVNRRANQDIKKDLYPIPEQIKANPNVHMLWDALHKQKLITDEKYARLTSNTAFSEKQLGDFIARQLVETGQGTKGVADLLEQLFKDTVIVYAKASNVSDFRRDNGFLKSRLVNDFHHAQDAYLNIVVGNVYYTKFTKNPWNFICKDYEKDKEKNRYNLARMFDWNVVRGSETAWIVERKDEKGTISTVRKMMQKNTPLLTRMNFEQHGSIANATLYSAKKAKSENYLPLKTADEKMSDVKKYGGYTSMSIAYYFIVHHKEDKKENVTIEALPLYCKDKVEREENGLEKYCEEVLGYGEVNIIRRKLKIQSLLEFNGYQVHLSGKTGNQLILRNAISLCLSTKWITYIKKLEKAVNIQIVEEVVTPEENIKLYNLLADKHANTVYSKRPNAYGEKLLADREIFVTLEFGKQCEALLQILSLTKIGSTEANLLLIGESEHSGKILISKNLKASDRPAVINQSPCGLYEKKEWIFDKIVEK

SEQ ID NO: 110 - protein, 1436 aa, Capnocytophaga gingivalis
MKYIKYILGLDIGSNSIGWALIQLDLLQKTKRIIAAGSRIIPMDQKVLSDFGKGITISPTAQRTSYRNARHCRERHLLRRERLHRVLHILGFLPTHYDKQIDFSKRYGKFVDNTEPKIAYNEGKFLFMDSFQEMLSDFKSHQPDLFYTKKNGEESKIPYDWTIYYLRKKALSQKISKEELAWIILNFNQKRGYYQLREEEGNKENDFEIISSKIISVIKKDKDKKYNKYWYDIILENGLVYQAAFYNDFVYNWINQDREFIIERTSLKNGAEKVKLSYLPTFDEIDKMDKKEQDKYYKKIKIKTENSIGNKTVGCYIYDHILQNPNEKIKGKLVRTIERKYYKEELKAILEKQIALQPELFTDQLLADCIRELYSKNEAQQRNLAARDFVHLLVEDIIFYQRPLRRQKSTLANCSLESRSYIDKDSHTRKEAPLKVCPKSNPYYQEFRVLQWLQNLKIYEIDSDQEVTHQFIKTLEDKQQLFEFLMAQKEIDCEELLKYFLNQTYPNAKEKALKSELKKWKDTYRWNYVYDIGEKSSKKYPMNETRYELKRHLEKVANLPDDFLSSEVEYLLWHLIYSVKDKVAYEKGLKKFAQKHHLDKDSFVESFKKFNPYPSEYGSFSEKAIRKLLPLMRFGAHWDFNHIDKNTQKRIEDLITGVENEEIRTILREKAEKYQLEKETDFQDLPLWLAQYIVYNRHAEASSLEKWTSVNDLETYLNEFKQHSLRNPIVEQVVMETLRVVRDIWQQYGQGQASFFNEIHIELGRELKKTAKEREKLSKQNQKNEDINLSIKEKLKELEKYNTRAYSITHQEKYKLWLEQKHISPYTGQIISPENLFTDNYEIEHIIPQSRFFDDSLSNKVVCESIVNKAPYKDRQLGLEFIKNQGGRIVKELSKENKTIKIFTEEQYRTFIKEHYSNNPEKTKKLLLEEIPEKMVARQMNDTCYISKFISEILSKIVRSDEQDEGVHSKNVILCTGKITSILRQDWGLNDIWDNLILPRFERMNNLLQKEKFTIYSIEKQKKIPVVPINDQFKSFQKKRIDHRHHAMDAIIIACTTREHINYINNQHALEKEKDKKEKQEERDKLREKLCIKKYNNRSEGNYSWIFKKPWDTFTQEVRVALEDIVVSFKQNLRVINKATNYYERWVEENGKYIKKMVKQEGTNWAIRKPLHEETISGKIYLDREKITKNDILTATRKTVDSSFDDKRIKKITDTGIQKILLNYLKYKGSPEIAFSPEGLEELNKNLSIYNDGKPHKPIYKVRIYEKGSGRFALGEKGRKYKKYVQGASNLYFGIYQGAKRSFATIPLNEVIERQKQGLPSVPEYNEKGDLLLFSLSPNDLVYVPIEGEIIENIDFRNLSKEQKERIYNVNDFSSTCYFTPNRIAKAIFPKEVDLQRKGDKLSGSYDTKTASLEGIQIKEVCIKLKVDRLGNISKA

SEQ ID NO: 111 - protein, 1069 aa, Bacillus cereus
MNYDIGLRIGITSCGWSIINKDLERIEDLGVRVFEKAENPDGTASAAPRREARKSRRKHRRKKHRIERIKRLIVQHDLLSKKELDSLYLSPFNIDVWNLQVEALERKLDNREFARVLIHLVQRRGFQTIRKSVEIQEEGKLLENVSENERIMKVNGYKTVGEMFSKHEKFTHHKRNKDGSYTSVVTRSLLLKEIKTIFNSQRILGNVFSTQKLESDYLYIWGSQRPTLTYEQLMSMVGNCIYEKKEKRAPKTSWAFQYFSLLQKINKLKVSDDNTLRKLSKEERDIVIELAFKKKNVSFVDIRKALKLNDNTKFNHLTYSHVVETKKVEKATFIELKGYHLIKKQLKDRNVELTQELQPKDYDAIAAASTFFKNDIEFRDYLRNQYLDSNGKRKSNIANKVFEDKVIAAVFELNFSKVCHLSFKSLYKLIPHLEKGLDYKEAILCAGYNFRDENKRDKKLFLPVIQQETNPVVHRALTQARKVINAIIREYGSPNTIRFVVANDLAKTYKQRKELESTLKKNRAENEKIKTKLLSMGIINPTGMDIVKYKLWYEQSGICLYTGRQMELSSLFKPGYSIVNHIIPYNRSFDDTYHNRVLTLTETKYEKGNKIPFEYFGAEETCWNEYEKRVSTSKKIHDKKREKLLIRNFDIEYENEMISNNVFDTHYIGSYFEKYIDEHLQFKKSTKKQKVFSIHGNMVAHLHSRWGFNKNSREIYLNHAVDAAIVAVLTDQLIRNIADYYRRDNILEQKGSLKFPEPWKSFSIELEARISPQVRDLIKKLNLDSYLDVDILHIKPVFISKKPRRKVNGEAHKSTIRSLIGINEIGKTVTCIKTRLEDIPFDENGDFPMYGKDTDKYTYTAIKERYLEFNKDKEKAFSTPLYKLKRNGEPGNQIKSVKIIDTRNIVNKVNQGKGIAYNSNIIRVDVFSRDQKYYVVPIYLRDFIKGSLPNKIITAAKGFMQWPETDNSYTFLFSIFPNDLIKVVPKEGKFIKAKNENKENINLTEILGYFKGLDSSTGAFTLESHDGSLLARGIGTKNLLLIEKYQVDVLGRYNKVGNEERQDIKIQQN

SEQ ID NO: 112 - protein, 1391 aa, Lactobacillus jensenii
MKEIKDYIIGLDIGTNSCGYVVTDKQNNILKLKGKTAIGARLFKEGEAAADRRAFRTTRRRLARRRWRLSLLEEIFDEEMNKVDPSFFRRLKESDYSPKDRRKQFNSIVFESSEADKAFYEKYPTIYHLRNALMHDNQKHDLREIFLAVHHIVKYRGNFLREDSVKAFKAAKFTLQGEDGIGPVDKLNDLLKEIYIEAAPELATDNLSKIEDIIKDKKLYKQDKLKQIANLLPKAVDSKDKAKLNKDIAKQVANALMGYMFRLDTLFSFTDVDVKDYKLKFSDANIDESLDALTSLLTDAQIEFVLELQSIYNTIVLNEIVPDGMSLSESMVKKYDDHKKDLKLYKEYIDSLSDQKKAKQLEAAYALYVNYRKADLLAAKKLFEKKKIGDKKFVDVISNFEVFGKFVSDNLDDSELANKIKARLDLGEFLPKQRTNQNGVIPYQLHQVELTQILEKQGKYYPFLITPNPVESHRNNAPYEISELVSFRVPYYVGPLIDNQSIKDKQNKNKFAWMVRQKQGQITPWNFEEMVDTTESANQFIKRMTRKDTYLLAEDVLPKSSLIYQKFMILDELNRIKIDGKKLTSKLKHDIFEKLFKKQKSINLDNLKNYLLAEGNIPGLIEGLSDGINFNNSFSTYIDYRNIFGDEIDNPNKQADFEKMIEWSTVFEDRKIFKRKLKEITWLTPEQIKQVSSKRYSGWGRLSKKLLTQITDENGVNILQRLWNEPETLTEVLANPVIKRKISEANSLFVQINKVENILDDAYTSPQNKKAIRQVIRVVDDIIAAAHGKKPSQIAIEFARSSQNKAKVPDTRKKQLDKIYNKISSEILDSSIKNELKNLKSNKYLSKDKLFLYFKQMGRDAYTGDKLSLDQLQNYDIDHIFPRSFIKDDSLDNRVLTQKPINAKKSDYGIPALEFGNKYVPDLGITVKEMWKLWQENGLISKSKLINLCTNPKKIGSKRASGFINRQLVETSQVIKLVAIILQAEFPDTEIIEVKALQNTTLRESFHLYKNRSVNDYHHAIDAYLTTIVGNYLYQVYPKLRPYFVYGQFKKFNQEKNIDILKRLKNFNFLRQLIFNTDDNIYISGTKEIVFNKKDIIHKLETAYGYKYMNISRECYQETSSLFNQTLYAHNSSVKNSLIPKKKGLPTEIYGGYSGNKDSFFVLVKIVKKRTNLYRIVGIPTRELAKLNSSNNYNQALNKIVESKLCLKETESFKILIKRLLYGTLIVDNGQKFRIGSFKEKHNVQQLVLQLKSMKYIKFYIDGGQNYFTDVERKKLEKQDRDKCLLYVFDDIMNVVNKRFTLFDMSKYEKDGDSLREKFNCLDFNDKVSILSDLLKAFHANSDRTSITKLKITNLGRHQAGKNGITLTTNAQIIYQSPTGLFERRIKIKDL

SEQ ID NO: 113 - protein, 1114 aa, Eubacterium rectale
MNYTEKEKLFMKYILALDIGIASVGWAILDKESETVIEAGSNIFPEASAADNQLRRDMRGAKRNNRRLKTRINDFIKLWENNNLSIPQFKSTEIVGLKVRAITEEITLDELYLILYSYLKHRGISYLEDALDDTVSGSSAYANGLKLNAKELETHYPCEIQQERLNTIGKYRGQSQIINENGEVLDLSNVFTIGAYRKEIQRVFEIQKKYHPELTDEFCDGYMLIFNRKRKYYEGPGNEKSRTDYGRFTTKLDANGNYITEDNIFEKLIGKCSVYPDELRAAAASYTAQEYNVLNDLNNLTINGRKLEENEKHEIVERIKSSNTINMRKIISDCMGENIDDFAGARIDKSGKEIFHKFEVYNKMRKALLEIGIDISNYSREELDEIGYIMTINTDKEAMMEAFQKSWIDLSDDVKQCLINMRKTNGALFNKWQSFSLKIMNELIPEMYAQPKEQMTLLTEMGVTKGTQEEFAGLKYIPVDVVSEDIFNPVVRRSVRISFKILNAVLKKYKALDTIVIEMPRDRNSEEQKKRINDSQKLNEKEMEYIEKKLAVTYGIKLSPSDFSSQKQLSLKLKLWNEQDGICLYSGKTIDPNDIINNPQLFEIDHIIPRSISFDDARSNKVLVYRSENQKKGNQTPYYYLTHSHSEWSFEQYKATVMNLSKKKEYAISRKKIQNLLYSEDITKMDVLKGFINRNINDTSYASRLVLNTIQNFFMANEADTKVKVIKGSYTHQMRCNLKLDKNRDESYSHHAVDAMLIGYSELGYEAYHKLQGEFIDFETGEILRKDMWDENMSDEVYADYLYGKKWANIRNEVVKAEKNVKYWHYVMRKSNRGLCNQTIRGTREYDGKQYKINKLDIRTKEGIKVFAKLAFSKKDSDRERLLVYLNDRRTFDDLCKIYEDYSDAANPFVQYEKETGDIIRKYSKKHNGPRIDKLKYKDGEVGACIDISHKYGFEKGSKKVILESLVPYRMDVYYKEENHSYYLVGVKQSDIKFEKGRNVIDEEAYARILVNEKMIQPGQSRADLENLGFKFKLSFYKNDIIEYEKDGKIYTERLVSRTMPKQRNYIETKPIDKAKFEKQNLVGLGKTKFIKKYRYDILGNKYSCSEEKFTSFC

SEQ ID NO: 114 - protein, 1362 aa, Lactobacillus paracasei
MTKLGKPYGIGVDIGSNSIGFAAVDENSHLIRLKGKTVIGARLFEEGKAAAKRRAGRTTRRRLSRNRWRLSFLRDFFESHITPTDPNFFMRQKYSEISPKDKARYKYEKRLFNDRTDAEFYQQYSTMYHLRNRLMTDPSRADVREIYFAIHHILKSRGHFLTPGDAKDFNTNDVALDEIFPALQDAYAQVYPDLGITFDEDKANEFKTILLNEIATSIDTQRALVKLLLAEEDDKDILKQQKQVLTEFAKAVVGLKTKLNLALGTEVDSSEATAWNFSLGQLDDKWAGIESAMTDEGTEILDQIRDLYRARLLNGIVPTGKTLSQAKVDDYTQHHEDLQLFKAYLKQLEDDGTAKAIRQLYDRYIDGDDAAPFLRENFVKALTKDVTAHPNTKSPELLERLAQPDFMLKQRNKANGAIPVQMQQRELDQIIKNQAVYYDWLAAPNPVEKHRKSMPYQLDELLNFRIPYYVGPLVTAKEQKAAQGGVFAWMVRKDPEGNITPYNFDEKVDREASANTFIQRMKTTDTYLIGEDVLPKQSLLYQRYEVLNELNNVRVNNEKLSIEQKQQVIRELFERHNSVTIKQFAENLRAHGDYAHIPEIRGLADEKRFLSSLSTYRQLKSLLPEAIDDPAKQADIENIIAWSTVFEDAAIFKTKLKEISWLGSEAITKLSNIRYRGWGQFSRKFLNGLTLGNGHTIIQELLLSTNNLMQILTDETLQKKMTELNADKLKTANINDAIDNAYTSPSNKKALRQVLRVVDDIKRAADGQDPSWLYVETADGGGTPGKRTRARQHQLQEIYANAAHELIDTAVRGELEDKISDKADFNDRLVLYFMQGGRDIYTGAPLNIDQLSSYDIDHILPQSLIKDNSLDNRVLVHAIINREKNATFASTIYAQKMNATWRQWHEAGLISGRKLRNLQMRPDQIDKYASGFVARQLVETRQIIKLTEQIVAAQYPDTKIIAVKAGLSHQLREELEFPKNRDVNHYHHAFDAFLAARIGTYLLKRFPNLQAFFTYGKFTKADVKKLRGFNFIRDITHAEDKIVAKDTGEVVWDKQRDVDELDRIYNFKRMLITHEVRFETADLFKQTVYGARDSKEAGGSKQLIPKKKGYPVDIYGGYFRENTAYLAVVKVTKKTETIFKVVKIATSQVAALNKARSRSTAEELSVLTELLKPKFSKVGKNGKITDTPFEVVLPRVPREQLFYNAKYGFFMVNSDTMFHNFQEIWVSRSDQKILQQIRKAKIDYPNVDQDLDNLFHNLADQIVKYFDLYSIAGFKEKISQSQNTFNDLAVDDTDQSVGKITVINELLKGAQANGMTGSLKVLKISTPFGFTQDKSGVLTKDSSIIYQSPTGLFERSVRLTDL

SEQ ID NO: 115 - protein, 1056 aa, Actinobacillus minor
MKALNYILGLDLGIASVGWAVVEIDQNELPIRLIDLGVRTFERAEVPKTGDSLALARRLARSSRRLVRRRAVRLLKAKRLLKQEGILQADDFHSSHLKPLPNNPWELRVKGLNHLLDRKEWAAVLLHLLKHRGYLSQRKNESKTDNKELGALLKGVSENRQLLQAQAFSTPAEIAIKKFQQEEGHIRNQRGAYSHTFDRNDLLAELRLLFQKQREFNNPYTSQSLEQAIAELLMWQKPALSGEAILKMLGKCTFEPSEYKAPKNSYSAEYFVWLTKLNNLRILENGADRGLTAEERQLLINQPFEKAKFTYAQARKLLELSDLAIFKGVRYGKDNAESATLMEMKAWHAIRKALESNGLKTEWNGLKTKPELLDKIGTAFSIYKTDEDISQYLNGELSPAVLNALLENLSFDKFIRLSLQSLAKILPLMEQGLRYDEACKQVYGDHYGKKEQLELRFLPKIPVEDIRNPVVLRTLSQARKVINGVVRLYGSPARIHIETGREVGKSFSERRDISKRQEENRNERQRAVEKFKEFFPHFVGEPKAKDILKMRLYEQQHGKCLYSGKELDLNRLLEKGYVEIDHALPFSRTWDDSFNNKVLVLASENQNKGNQTPYEWLNGKENAERWKLFQALVNGSRFPYSKKQRILTKYLDEDGFRERNLNDTRYVARFLCNFIEDNMQLVGQGKKRVFASNGQITALLRRSWGIQKVREDNDRHHAVDAVVVACSTRALQKKITDYVRYKEMNVFTGEKIDQETGEIIKFHFPEPWKFFRQEVEIRVFSETPAEDVVIALPDRPQANHEFIQPLFVSRAPTRKMTGQGHMETIKSAKRLAEGLSVSRVPLTQLKLKDLENMVNREREKALYEALKVRLEKFNNDPAKAFADPFYKKGGQQVKAVRVEQVQKSGVLVRQENGVADNASMVRVDVFIKGGKYFLVPIYTWQVAKGILPNRAATQGKEEEYWDIMDETAIFQFSLYQNDLIKLVTKKKTIFGYFNGLNRATSNINIKEHDLDKSKGKDGIYLEVGVKLALSLEKYQVDELGKNIQPCRSMKKRPPVR

SEQ ID NO: 116 - protein, 1081 aa, Neisseria flavescens
MTAFKPNPINYILGLDIGIASVGWAMVEIDEEENPIRLIDLGVRVFERAEVPKTGDSLAAARRLARSVRRLTRRRAHRLLRARRLLKREGVLQAADFDENGLIKSLPNTPWQLRAAALDRKLTPLEWSAVLLHLIKHRGYLSQRKNEGETADKELGALLKGVADNAHALQTGDFRTPAELAVNKFEKESGHIRNQRGDYSHTFSRKDLQAELVLLFEKQKEFGNPHISDGLKEGIETLLMAQRPALSGDAVQKMLGYCTFEPTEPKAAKNTYTAERFIWLTKLNNLRILEQGSERPLTDTERATLIDMPYKNKLTYAKARELLGLDDTAFFKGLRYGKDNAESATLMEMKAYHAIRRALEKEGLKDKKSPLSLSPELQDEIGTAFSLFKTDEDITGRLKGCLQPEILDALLKHINFDKFVQISLKALRRIVPLMEQGKRYDEACAETYGDHYGEKNSEEMLYLPPIPADEIRNPVVLRALSQARKVINGVVRRYGSPARIHIETAREVGKSFKDRKEIEKRQEENRKDREKAAAKFREYFPNFVGEPKSKDILKLRLYEQQHGKCLYSGKAIDIRRLNGKGYVEIDHALPFSRTWDDSFNNKVLVLGSENQNKGNRTPYEYLNGKDNSREWLEFKARVETSRFPHSKKQRVLLQKFDEKGFKERNLNDTRYVNRFLCQFVADHMQLTGKGKRRVFASNGQITNLLRGFWGLHKVRAENDRHHALDAVVVACSTVAMQQKITCFVRYKEMNAFDGKTVDKETGEVLHQKTHFPQPWEFFAQEVMIRVFGKPDGKPEFEEADTPEKLRALLAEKLSSRPEAVHEYVTPLFVSRAPNRKMSGAHKDTLRSAKRFVKHNEKISVKRVWLTEIKLADLENMVNYKNGREIELYEALKARLGAYGGNAKQAFDPKDNPFYKKGGQLVKAVRVEKTQESGVLLNKKNAYTIADNGDMVRVDVFCKVDKKGKNQYFIVPIYAWQVAENILPDIDCKGYRIDDSYTFCFSLHKYDLIAFQKDEKSKVEFAYYINCDSSNGRFYLAWHDKGSKEQQFRISTQNLVLMQKYQIDELGKEIRPCRLKKRPPVR

SEQ ID NO: 117 - protein, 1392 aa, Gemella haemolysans
MANKTWYLGLDIGSASVGWAATDTGYKIIRKNKKRLWGVRLFEEAKTAEDRRGYRSSRRRLARRKWRLNLLEELFTSEVKKVDENFFLRLKESQYHYEDKTHKVPYAIFNDKDYTDKDYYKDYPTIYHLRSKLMTEENPDIRKVFLAIHHIIKNRGHFLLQGQSFKDGNLNNLIKELLELDILHVGFEVTEEVVDKIADISLEKKTSKDKLNDIKELYPKEKQLLEVFRLIFGGKTSLDKLFAIDEYKELDAAIKSVSFKEKIYEEVRHDYEQVLSNYIELLDLAKLVYDSIILSDIKKEGKTLSESKVELFEKHRDDLLKLKNLVKNDSKLSEDKKVELYALIFKEDKDKGTNYVNYIRKSEEGKGCNYEDFKKFLVKELAKLEESSVKTEIIKDLELEQFLPLQRTKDNSVVPYQIHKEELVKILDNAARYHSFLNEKDESGYNVREKVIQLLEFRIPYYVGPLNSSKKAKEGGFAWSVRNTGYENTPVTPWNYSKVIDESASAEKFITNLTNKCTYLKGEDVLPKSSLLYSEFALLNELNALKYDGNRISLEARNTIIEKLFKQQGKKVTKTSIKNLLKAEGYIDGKGEITGIDITVKNDLKSYRDFKKILGNKFNSEHVENIILWITLYGESRKLIKAKIESVYGEVYSKDEITKMSRLVYKDWGRFSRKLLTELVSKKLYNEETGECLNIIGAMRQNNILFMELLADRFDYSKQIVEFNKELQEDVTEIAPEILDDLYVSPAVKRSIWQTVRIVEELKKIIGCAPAKIFVETTRSNQEKKKPTDSRKKQLELAYKAVKKDVKELEKEIGTINFDVLNDRLSSVEPSKLKAKKLYLYYTQLGRCMYSEEPINISELFDNNKYDIDHIYPQSKIKDDSFTNTVLVKRESNAAKTDRYPLGSDIQTPSNRRFWKFLKEKGLISDEKYNRLVRTEEFSDEELSGFIARQLVETSQSVKAVASILGELNPETSICYSKAENVSSFRQNFGKIKKGDRDSKNNDQLIKVREINDYHHAKDAYLNVVVGNVYDTKFTRNVFNFIKDKKDGRKYSLNKVFYENVSDSKTVAWEMDKTIHQVEKVMNNNNIMVTRRTSEQKGGLFDATVYKAKVAAKAKDGVYYPLKTSNSVVKDVAKYGGYTSIGIAYYSIFEYTIVNKKGEEKITRIIPIPIYISQNIKDSTALIEFGKSQIFCRAYEKIKDFKLLYRKLCIGSKININNYQYYIGGKSDERFYYDSAIQVTLDKKSEKYLKILSKYQNWKKENKDGELWENITKENNIELYNKLVEKMNSEIFTKKKSNKYNELNSEEIRNNFIKISVEEQAKVLLEILNLLTNKKSIFDLKSIDIKAARGKISFNLTSLIQFSIIEQSITGFYEKEITIIGDKGNDMENNNS

SEQ ID NO: 118 - protein, 702 aa, Helicobacter pullorum
MRKILKIDERIQFKEVDYTAKNPENKKFVEFKNLKKFCEILGAIVGDRALADSIARDMTLIKDEEELAQKLRGYGKFSQEQITQLSALHFSHHISLSLKALSEILPFMREGMRYDEACQEAKLQAKHNDKKSKFLPPFCESIYADELTNPVVHRAIAEYRKILNALIAKYGSVHKIHIELTRDVGKNFQEREKYKKEIESNYKARVQAMQECEKLGLTLSEGNILKLRLFREQNEICVYSGRKITLANLKEQGALEIDHILPYSRSSDDSYMNKVLVFTNENQNKGNKTPYEAFGGDSQKWGEIESLALRSGYPKKKAKRILDKGFGDREAGFKSRNIVDSGYIARLIANYTKEYLKFLPLDSHENTALIAGEKDSKIHVEAVKGMLTATMRHFWGLGSKNRYEHTHHAVDAIIIAYINAAMIQRFSQFRQNQESLKARFYAKELAKEEFKTQRAFFEPFSGFREQVLAKVGQIFVSRPPRKRARGALHEETFYSIDDKKLSETYGGKKGVQRALSLGKIRQIGTKIVANGPMVRVDIFKHTQSGRFYAVPIYTMDFALGILPNKAVVSGKDKDRIIKDWLEMDSCYEFCFSLFKDDVIEVQKRDMEKPELAYFVSLDASDGRIKVRHHCNDITKINENQKKLFSEAIEKEVVGRGSIQNLKVFKKYKVSPLGEIKEAKYEPRQPIALKTSPKKHRKQNNAQ

SEQ ID NO: 119 - protein, 1371 aa, Streptococcus dysgalactiae
MDKKYSIGLDIGTNSVGWAVITDDYKVPSKKFKVLGNTDRHSIKKNLIGALLFDSGETAEATRLKRTARRRYTRRKNRIRYLQEIFSSEMSKVDDSFFHRLEESFLVEEDKKHERHPIFGNIVDEVAYHEKYPTIYHLRKKLADSTDKADLRLIYLALAHMIKFRGHFLIEGDLNPDNSDMDKLFIQLVQTYNQLFEENPINASRVDAKAILSARLSKSRRLENLIAQLPGEKRNGLFGNLIALSLGLTPNFKSNFDLAEDAKLQLSKDTYDDDLDNLLAQIGDQYADLFLAAKNLSDAILLSDILRVNSEITKAPLSASMIKRYDEHHQDLTLLKALVRQQLPEKYKEIFFDQSKNGYAGYIDGGASQEEFYKFIKPILEKMDGTEELLAKLNREDLLRKQRTFDNGSIPHQIHLGELHAILRRQEDFYPFLKDNREKIEKILTFRIPYYVGPLARGNSRFAWMTRKSEETITPWNFEEVVDKGASAQSFIERMTNFDKNLPNEKVLPKHSLLYEYFTVYNELTKVKYVTEGMRKPEFLSGKQKEAIVDLLFKTNRKVTVKQLKEDYFKKIECFDSVEISGVEDRFNASLGTYHDLLKIIKDKDFLDNEENEDILEDIVLTLTLFEDKEMIEERLKKYANLFDDKVMKQLKRRHYTGWGRLSRKLINGIRDKQSGKTILDFLKSDGFANRNFMQLINDDSLTFKEAIQKAQVSGQGHSLHEQIANLAGSPAIKKGILQSVKVVDELVKVMGHKPENIVIEMARENQTTQKGQKNSRERMKRIEEGIKELGSQILKEHPVENTQLQNEKLYLYYLQNGRDMYVDQELDINRLSDYDVDHIVPQSFIKDDSIDNKILTRSDKNRGKSDNVPSEEVVKKMKNYWRQLLNAKLITQRKFDNLTKAERGGLSELDKAGFIKRQLVETRQITKHVAQILDSRMNTKYDENDKLIREVKVITLKSKLVSDFRKDFQFYKVREINNYHHAHDAYLNAVVGTALIKKYTKLESEFVYGDYKVYDVRKMIAKSEQEIGKATAKRFFYSNIMNFFKTEITLANGEIRKRPLIETNEETGEIVWDKGRDFATVRKVLSMPQVNIVKKTEVQTGALTNESIYARGSFDKLISRKHRFESSKYGGFGSPTVTYSVLVVAKSKVQDGKVKKIKTGKELIGMTLLDKLVFEKNPLKFIEDKGYGNVQIDKCIKLPKYSLFEFENGTRRMLASVMANNNSRGDLQKANEMFLPAKLVTLLYHAHKIESSKELEHEAYILDHYNDLYQLLSYIERFASLYVDVEKNISKVKELFSNIESYSISEICSSVINLLTLTASGAPADFKFLGTTIPRKRYGSPQSILSSTLIHQSITGLYETRIDLSQLGGD

SEQ ID NO: 120 - protein, 1007 aa, Helicobacter canadensis
MKVLGFDIGINSIGWAFVENNELKDCGVRLFTKAENPKTKESLALPRRNARSSRVRLRRRRSRLLSLKHIISKEFGLHYEDYIALDGNLPKAYTGKIESIYKLRYEALSQAISKEDLARVILHIAKHRGYMNKNQKTSQDSEKGAILSAIKENSNKIKHYQTAGEYFYKELFENLRDGTKEFKNIRNKAMKNEKTGNMESTYYNTILASDLEKELKLILEKQQAYHNYSDTFIKEVLEIAFYQRPLKDFSHLVGSCTFYENEKRACKNSYSAWEFIALGKIINTLESIKKDTGEIFSNEIITQILKEVLDKGSLSYTKLRKMINLDEKVKFKGLKYDKEGVEKTNLIEFKKLKEFKKALGEHNLERKTLDEIATHITLTKDENQLKKQLEQYALSQNQIDALAELDFNDHINLSFKALYEILPLMEKGKRYDEACNELGLKAKTSNQKSEFLPAFCDSIFAQELTNPIVNRAISEYRKVLNRLLKKYGKMHKIHIELARDAGLSKEARNKIEKEQKENKDINDKAEKTCKEFGLKPNAKNILKIKLWREQGEICAYSGKKITIDDLKEDKALEVDHIYPYSRSYDDSYNNKVLVFIKENQLKLNQTPYEAFGSNQEKWSKIQVLAQKLPYKKKNRILDENFKNKDQIEFISRNLNDTRYATSLIAKYTKEYLEFLPLSDDEDISLKSGEKGSKTHVQTMNGMLTSVLRHAWGFSQKDRNNHLHHALDAIIIAYSTNSIIKAFSDFKKNQEILKAKLYAKKLTSEEYKNQSKFTGFEKYRSKILEKLDSIFVSKPPNKNTKGALHEQTFYSYQDILEEYKTQEGLKRALECGKVRKIGTKYVVNDRMVRLDIFKKDNKFYGIPIYTMDFALGVLPNKVVTIGTDKDKIKKEWKTIDETYEFCFSLYKGDLVLIQKKEMQESEFAYYNGFDISSASISLEKHDNKFENLTENQKLLFPKAKEGDVEVRGIGIQGLKVFKKYMVTPLGEIQETRTEARQNIQPRKKHGLR

SEQ ID NO: 121 - protein, 1397 aa, gamma proteobacterium
MTKNYISPIAIDLGAKFTGVALYQYLEGADCTQEVAKGLLVDDRGNVTWSQEGRRGKRHQVRGYKRRKMAKRLLWLILDSEYGIKREEVTEPLLKFINGLLNRRGYTYISEEVDEESMNVSPLPFSEMMPDYFNSSAPLLEQLAKLLSDKNKLVRFRAEGKIPSNKNEFKKLLDTALDGKYKDEKKELSEAWGNILIASENVLKSTVDGHKSRSEYLANIKEDIKSNEELEKQISSKEIDGFYNLVGHLSNFQLRLLRKYFNDPNMSGVSYWDEKRLEKYFYQWVQGWHTKGGTDEAEKKNIILKTKGAPLLKTLKSLSADLTIPPYEDQNNRRPPKCQSVLLSDEKLTMHYPKWKEWVGQLVKQNDNAYLNENVTLANALHRIVERSRSIDPYQLRLLISITDAEKRNDLAGYKRLKLSLGSEVDEFLLLVKNIVDETKEAREGLWFETENKLFFKCGKTPPRKEKLKSTLLSAVLGKNLSDDEQSSFIEEFWKSGTPKIERRNVRGWCRLASQVQKTYGVYLKEYGLQQLHKLEAGKKLDDKPLALLYKNSGLIASKIGEALNIEPDEVSRFASPHSLAQIFNIIEGDVAGFNKTCRACTYENIWRMQEEKVESLLTNQLLSEIHGERKVPLKSAMCTRLSADSTRPFDGQMASIIEHIARKIAQHKIAQINDVPKEFSIDIPIIIESNQFSFTAELEEIKRGRGSAKAKKAKELGEKSKAGWVSKTERIKTSSEGICPYTGAPLGGSGEIDHIIPRSLTGRTKKTVFNSEANLIYCSSKGNHDKGNRVYVIEQLNDKYLKKQFSTSDVNLIKKKIKTTIQRFTEGGEKLRSFSELSREDQKAFRHALFVPELKSEVTSLLAVKNITRVNGTQAWLAKKIASLLAEHLDKQGRDYTLSAHQIDPWSVSKQRKMLASAEPIWAKKDPQPAASHVVDAVCTFLEALEQPHTASRLKTISSTSFEKTGWRSALIPDLIKVDALDRRPKYRRYNIGSTSLFKDGIYAERFLPILIDENGLMAGYDIDNSLKAKGADVVFESLSPFLLFKGEEVGAQSLSDWQERIDGRYLYMSIDKVKAFDYLQEKVGEKDIAAELLNSIHFTQRKTELRAKFSDDSGKKMKTLDAIRKSLKLTVTVNEIGKRKEKCGFSGTIGIPAKSAWENLLDEPLLETYWGTKMPPQEIWEKVYRKHFPRNIPNQAHRKVRKDFSLPVVDSVSGGFRVKRKTPNGYNYQLLAIDGYSAVGFKKEGDNVDFKSPALVPQIAESKSVTPISSELVHLDKNEIVYFDEWRKIDISDSDLKQFVSSLELAPGSQNRFYIRFTVDEDQFERHFKSALRVNGIQDLDTVNKTFDWNREIPSLLIPPRSNLFLLETGQKITFEYIANGANAEVKKAYSLRRA

SEQ ID NO: 122 - protein, 1082 aa, Neisseria meningitidis
MAAFKPNPINYILGLDIGIASVGWAMVEIDEEENPIRLIDLGVRVFERAEVPKTGDSLAMVRRLARSVRRLTRRRAHRLLRARRLLKREGVLQAADFDENGLIKSLPNTPWQLRAAALDRKLTPLEWSAVLLHLIKHRGYLSQRKNEGETADKELGALLKGVADNAHALQTGDFRTPAELALNKFEKESGHIRNQRGDYSHTFSRKDLQAELILLFEKQKEFGNPHISGGLKEGIETLLMTQRPALSGDAVQKMLGHCTFEPAEPKAAKNTYTAERFIWLTKLNNLRILEQGSERPLTDTERATLMDEPYRKSKLTYAQARKLLGLEDTAFFKGLRYGKDNAEASTLMEMKAYHAISRALEKEGLKDKKSPLNLSPELQDEIGTAFSLFKTDEDITGRLKDRIQPEILEALLKHISFDKFVQISLKALRRIVPLMEQGKRYDEACAEIYGDHYGKKNTEEKIYLPPIPADEIRNPVVLRALSQARKVINGVVRRYGSPARIHIETAREVGKSFKDRKEIEKRQEENRKDREKAAAKFREYFPNFVGEPKSKDILKLRLYEQQHGKCLYSGKEINLGRLNEKGYVEIDHALPFSRTWDDSFNNKVLVLGSENQNKGNQTPYEYFNGKDNSREWQEFKARVETSRFPRSKKQRILLQKFDEDGFKERNLNDTRYVNRFLCQFVADRMRLTGKGKKRVFASNGQITNLLRGFWGLRKVRAENDRHHALDAVVVACSTVAMQQKITRFVRYKEMNAFDGKTIDKETGEVLHQKTHFPQPWEFFAQEVMIRVFGKPDGKPEFEEADTPEKLRTLLAEKLSSRPEAVHEYVTPLFVSRAPNRKMSGQGHMETVKSAKRLDEGVSVLRVPLTQLKLKDLEKMVNREREPKLYEALKARLEAHKDDPAKAFAEPFYKYDKAGNRTQQVKAVRVEQVQKTGVWVRNHNGIADNATMVRVDVFEKGDKYYLVPIYSWQVAKGILPDRAVVQGKDEEDWQLIDDSFNFKFSLHPNDLVEVITKKARMFGYFASCHRGTGNINIRIHDLDHKIGKNGILEGIGVKTALSFQKYQIDELGKEIRPCRLKKRPPVR

SEQ ID NO: 123 - protein, 1334 aa, Listeria monocytogenes
MKKPYTIGLDIGTNSVGWAVLTDQYDLVKRKMKISGDSEKKQIKKNFWGVRLFEKGETAAKRRMSRTARRRIERRRNRISYLQEIFAIQMNEVDDNFFNRLKESFYAESDKKYNRHPFFGTVEEEVAYYKDFPTIYHLRKELIDSQKKADLRLVYLALAHIIKYRGHFLIEGALDTKNTSIDEMFKQFLQIYNQVFANDIEEASLKKTEKNQEVAQILAEKFTRKDKLDKILSLYPGEKTTGVFAQFVNIIVGSTGKFKKHFNLHEKKDINCAEDTYDTDLESLLAIIGDEFAEVFVAAKNAYNAVVLSNIITVTDSTTRAKLSASLIERFENHKEDLKKMKRFVRTYLPEKYDEIFDDTEKHGYAGYISGKTKQADFYKYMKATLEKIEGADYFIAKIEEENFLRKQRTFDNGVIPHQLHLEELEAILHQQAKYYPFLREDYEKIKSLVTFRIPYFVGPLAKGQSEFAWLTRKADGEIRPWNIEEKVDFGKSAVDFIEKMTNKDTYLPKENVLPKHSLCYQKYMVYNELTKVRYIDDQGKTNYFSGQEKQQIFNDLFKQKRKVKKKDLELFLRNINQIESPTIEGLEDSFNASYATYHDLLKVGMKQEILDNPLNTEMLEDIVKILTVFEDKRMIKEQLQQFSDVLDGTVLKKLERRHYTGWGRLSAKLLVGIRDKQSHLTILDYLMNDDGLNRNLMQLINDSNLSFKSIIEKEQVSTTDKDLQSIVAELAGSPAIKKGILQSLKIVDELVSVMGYPPQTIVVEMARENQTTNKGKNNSKPRYKSLEKAIKEFGSQILKEHPTDNQELKNNRLYLYYLQNGKDMYTGQELDIHNLSNYDIDHIVPQSFITDNSVDNLVLTSSAGNREKGDNVPPLEIVQKRKIFWEKLYQGNLMSKRKFDYLTKAERGGLTEADKARFIHRQLVETRQITKNVANILHQRFNYKTDGNKDTMETVRIVTLKSALVSQFRKQFQFYKVREVNDYHHAHDAYLNGVVANTLLKVYPQLEPEFVYGEYHQFGWFKANKATAKKQFYTNIMLFFAQKDRIIDENGEILWDKRYLETVKKVLGYRQMNIVKKTEIQKGEFSNVTPNPKGKSNKLIPRKKDWDPIKYGGFDGSKMAYAIIIEYEKQKRKVRIEKKLIQINIMEREAFEKDEKTFLEEKGYHQPKVLIKVPKYTLYECKNGRRRMLGSANEAHKGNQMLLPNHLMALLYHAEKYEAIDGESLAYIEVHRALFDELLAYISEFARKYTLSNDRLDEINMLYERNKDGDVKSIAESFVSLKKFNAFGVHQDFSFFGTKIERKRDRKLNELLNSTIIYQSITGLYESRKRLDN

SEQ ID NO: 124 - protein, 1337 aa, Enterococcus faecalis
MKKDYVIGLDIGTNSVGWAVMTEDYQLVKKKMPIYGNTEKKKIKKNFWGVRLFEEGHTAEDRRLKRTARRRISRRRNRLRYLQAFFEEAMTALDENFFARLQESFLVPEDKKWHRHPIFAKLEDEVAYHETYPTIYHLRKKLADSSEQADLRLIYLALAHIVKYRGHFLIEGKLSTENISVKEQFQQFMIIYNQTFVNGESRLVSAPLPESVLIEEELTEKASRTKKSEKVLQQFPQEKANGLFGQFLKLMVGNKADFKKVFGLEEEAKITYASESYEEDLEGILAKVGDEYSDVFLAAKNVYDAVELSTILADSDKKSHAKLSSSMIVRFTEHQEDLKKFKRFIRENCPDEYDNLFKNEQKDGYAGYIAHAGKVSQLKFYQYVKKIIQDIAGAEYFLEKIAQENFLRKQRTFDNGVIPHQIHLAELQAIIHRQAAYYPFLKENQEKIEQLVTFRIPYYIGPLSKGDASTFAWLKRQSEEPIRPWNLQETVDLDQSATAFIERMTNFDTYLSSEKVLPKHSLLYEKFMVFNELTKISYTDDRGIKANFSGKEKEKIFDYLFKTRRKVKKKDIIQFYRNEYNTEIVTLSGLEEDQFNASFSTYQDLLKCGLTRAELDHPDNAEKLEDIIKILTIFEDRQRIRTQLSTFKGQFSAEVLKKLERKHYTGWGRLSKKLINGIYDKESGKTILGYLIKDDGVSKHYNRNFMQLINDSQLSFKNAIQKAQSSEHEETLSETVNELAGSPAIKKGIYQSLKIVDELVAIMGYAPKRIVVEMARENQTTSTGKRRSIQRLKIVEKAMAEIGSNLLKEQPTTNEQLRDTRLFLYYMQNGKDMYTGDELSLHRLSHYDIDHIIPQSFMKDDSLDNLVLVGSTENRGKSDDVPSKEVVKDMKAYWEKLYAAGLISQRKFQRLTKGEQGGLTLEDKAHFIQRQLVETRQITKNVAGILDQRYNANSKEKKVQIITLKASLTSQFRSIFGLYKVREVNDYHHGQDAYLNCVVATTLLKVYPNLAPEFVYGEYPKFQAFKENKATAKAIIYTNLLRFFTEDEPRFTKDGEILWSNSYLKTIKKELNYHQMNIVKKVEVQKGGFSKESIKPKGPSNKLIPVKNGLDPQKYGGFDSPVVAYTVLFTHEKGKKPLIKQEILGITIMEKTRFEQNPILFLEEKGFLRPRVLMKLPKYTLYEFPEGRRRLLASAKEAQKGNQMVLPEHLLTLLYHAKQCLLPNQSESLAYVEQHQPEFQEILERVVDFAEVHTLAKSKVQQIVKLFEANQTADVKEIAASFIQLMQFNAMGAPSTFKFFQKDIERARYTSIKEIFDATIIYQSTTGLYETRRKVVD

SEQ ID NO: 125 - protein, 1426 aa, Capnocytophaga ochracea
MKNILGLDLGTTSIGFAHIVEDENKEKSEIKELGVRIVSLTTDEQSDFEKGKSITTNANRTLKHGARLNLDRYQQRRKYLIDLLQKANLITPSSILAENGKNTTHSTWQLRAKAVTERIEKEEFARILLAINKKRGYKSSRKAKTEDEGQAIDGMAIAKRLYDENLTPGQLSLQLLQQNKKLLPDFYRSDLQKEFDLVWNFQKQFYPDILTDIFYKELQGKGKDATSKAFSKRYHFDTTENKGSKESVRLQAYQWRAEAISKQLSKEEVAYVLTEINNNLNNASGYLGAISDRSKELYFNRQTVGQYLYAKLQENRHNSLKNKVFYRQDYLDEFERIWETQASFHKELTDELKKQIRDVVIFYQRKPKSQKGLISFCEFESKEIEIEKDGKTITKNIGARVVPKSSPLFQEFKIWQILNNVICKRKGIRKKKISAKTTQLDLLNESSQTIFSLDMECKQLLFDELNLKGDLKSDKVLKLLGYSPQEWEINYNQLEGNRTQKALYEAYLKIVEMEAHDVKDILQIKSAKDDWSLDESPLSASEIREKVKAIFQTLGICTKILYFDPLLPVKEFEEQDSYQLWHLLYSYESDDSTSGNETLYRILEKKYAFKREHARILANVALQDDYGSLSTKAIRKIYPNIKENQYSTACEKAGYKHSKLSLTTEELEARELKNIIPLLKKNALRNPVVEKILNQMINVVNALIEKNSERDAEGKITKYFHFDEIRIELARELKKNAQKRYEMTQNINKAKLEHQKISEILQKEFGIKNPTKSDIIRYRLYQELEHNGYKELYTNAPIARDMLFSKNIEIEHIVPKARVFDDSFSNKTLTFHRINSDKGEYTAFDYITSLNSEEELNQYLTRVENAYKTKSISPTKYKNLLKKASEIGDDFINRDLRDTQYIAKKAKEILFQVTKNVLSTSGSITDRLREDWGLVDVMKELNMPKYQSLGLTEVEERKDGNKVTVIKNWTKRNDHRHHAMDALTVAFTKPSYIQYLNHLNARKDENNKNYSVILAIEEKETIKVPTNNGKNKRVFIEPIPNFRQVAKKHLEEIFISHKAKNKVVTKNTNKPAGTDKQQITLTPRGQLHKETIYGKYQYYINKEEKIGVKFDERTIAKVSNPVYREALLKRLQANDNDPKKAFAGKNALSKNPIYLDESKTKTLPEKVNLTYLEEDFSIRKDISPDNFKDLKSIEKVIDQGVKRILIKRLQAYDNDPKKAFVDLEKNPIWLNKEKGIAIKRVTISGVNNAQPLHIGKDHLGKTTLNKEGKEIPVDYVSTGNNHHVAIYRDKEGNLQEQIVSFFDAVVRAQQGIPIIDKTYKQAEGWQFLFTMKQNEMFVFPNATTGFNPAEIDLLDPKNKKLISPNLFRVQKIATKDYFFRHHLETNVETDNILKNVTWKREGLSGLKDIVKVRINHLGDIVSIGEY

SEQ ID NO: 126 - protein, 1424 aa, Parabacteroides sp.
MKRILGLDLGTNSIGWALVNEAETDEEVSSIIRLGVRVNPLTVDETQNFEKGKSITTNAERTLKRSMRRNLQRYKLRRDALVEFLKELGFITDETILSEQGNRTTFETCRLRAKAAEEEISLEELSRVLLMINKKRGYKSSRKVKKEEDGVLIDGMEIAKKLYEEDLTPGQLCSQLLESGKKVLPDFYRSDLQEELDRIWSVQKQFHPDVFCDAAKEEIKGKNRSQTWAILANYFVWKEEVVGWNDREAKNETIEKECKLVGLKRTTKGYELKKENYRWRAQALTEQLGLEEIAVVLQEINGQINASSGYLGAISDRSKVLYFNHQTVGQYQMAELDKNPHASLRNMVFYRQDYLDEFDRIWEKQAEFHKELTAELKKEIRDMIIFYQRRLKSQKGLISFCEFERLEIVVEKDGKKQTKVIGCKVIPRSHPLFQEFKVWQTLNDIKVLGREKKRNALSASESRALYPEEKEILARELAIKENMKKADVLKLLFENPQELDLNFKQIDGNRTGFSLFSAYSKMIEKYGYEPLDFKKPADEIIGQLRTIFTDLGWNTNLFTIDLTKEGKELEMQPYFRLWHLLYSFEGDNTSTGNGKLIEKIMQLCGVEKEYAVELASLSFQDDYGSLSAKAIKRILPYLKEGNLYDVACEYAGYRHSKSSLTKEEIENKVLKGKLEVLPKNSLRNPVVEKILSQMVNVINTIIDTYGKPDEIRVELARELKKSAKEREELTKAIAKSTREHEEIRKLLQDEFGMMNVSRNDIIRYKLYEELKDNGYKTLYSNQYIPKEKIFSKEIDIEHIIPQSRLFDDSLSNKTLEYKAINIEKGNKTAYDFVKEKYGEEGLQQYINRCESLFNDKKAKLRKLKMEQKDIPDGFIDRDLRNTQYIAKKALAMLNEICRRVVATTGSITDQLREDWQLVDVMKELNLPKYEALGFVETYEDKDGRKIKRIKDWTKRNDHRHHAMDALTVAFTKDAFIQYFNNKNAAQDSGNRNHTNIIGIKTRYFDKGRALPPIPLEQFRIEAKQHLEKLLVSIKAKNKVVTVNVNRTKKRKGENTKIQQTPRGQLHLETVYGSHKQYVTKIEKVNASFDAAKIATVSKRAYRNALLKRLETFGNDPKKAFTGKNALEKNPLYADKYQTIRVPEKVQTVEFETIYTIRKPVDPALNVDKVVDVKVRAILERRLKEYGGDPKKAFVNFWENPIWLNKEKGISIKRVSIRGINNAQSIHVKKDKNGNPIWDENGKQIPVDFVNTGNNHHVAIYRKPVLDKKGQVTFDEDGNLMYELDEVVVPFFEAVTRANLGLPIIDKDYRKSEGWQFLFSMKQNEYFVFPNEKTGFNPKEVDLLNPDNYAMISPNLFRVQTMSKVMYGNNVVRDYKFRHHLETTVKDMKELKDIAYKQYKTLSFGNSVVKIRINHIGQIVSVGEY

SEQ ID NO: 127 - protein, 1395 aa, Lactobacillus jensenii
MKEIKDYIIGLDIGTNSCGYVVTDKQNNILKLKGKTAIGARLFKEGQAAADRRSFRTTRRRLARRHWRLGLLEEIFDPEMEKIDPNFFRRLKESDYSPKDSRKQFNAIVFKSIKADKRFYKKYPTIYHLRNALMHDNQKHDLREIFMAVHHIVKYRGNFLREDSVNAFKAAKFSLRGEDGIGPVDKLNDLLKEIYSEYSPELATNNLSKIEDIIKDKNLYKQDKLKQVATLLIKEADSKDKAKLNKDIAKQVANSFMGYMFRLDTLFSLTDVDVKDYKLKFSDANIDESLDDLTSLLTDAQIEFVLELQSIYNTIVLNEIVPDGMSLSESMIKKYDDHKEDLKIFKEYIDSLSDQKKAKKLLSAYNLYVNYRKSDLVEAKNLFKNKKVGDKNFADVISNFEVFGKFVSDNLDDSELANKIKARLDLGEFLPKQRTNQNGVIPYQLHQVELTQILEKQGKYYPFLITPNPVESHRNNAPYEISELVSFRVPYYVGPLIDNQSIKDKQNKNKFAWMVRQKQGQITPWNLEEMVDTTESANQFIKRMTRKDTYLLAEDVLPKSSLVYQKFMILDELNRIKIDGKKLTSELKHDIFEKLFKKQKSINLDNLKNYLLVEGNIPGLIEGLSDGINFNNSFSTYIDYRNIFGDEIDNPNKQADFEKMIEWSTVFEDRKIFKRKLKEITWLTSEQIKQVSSKRYSGWGRLSKKLLTQITDENGVNILQRLWNEPETLTEVLANPVIKRKIVEANSSFTKAKDMKDILVEAYTSPQNKKAIRQVMRVVDDIIAAAHGKKPSQIAIEFAREDQDNPQMTKSRKAQLDQIYAKISDEFLDDAVKNELKNMKDNKPLAKDKVFLYFKQMGRDAYSGEKLSLDNLQDYDIDHIYPQSFIKDDSFDNRVLVQRAYNNGKSDNVPVLLFGNKIAAGLGITIRQMWKKWLELGLISKRKFNNLITDPEKISRNMASGFVNRQLVETSQVIKLVANILQAKLPDTEIIEVKASYNSILRKEFNLYKSREVNDYHHAIDAYLTTIVGNYLYQVYPKLRPYFVYGQFKKFGKAENQEDDPVKKIKKFNFIYQLIWGKDDAICISHTNQQVFSKKDIIDKLTTAYNFKYMNISHAVYTRNNNMFKQTLFPIIERTTAKTKSLIPKKLDRPTDIYGGYSNNNDAYLALVKVDKKRGSEYRVVGIPMRAAAMLKASKNYDEDLRKVIEPMVMFDKNGKAKRGIEGFRVLVGKMPFKQAVLDGNKKFMLTGTVDTPNLKQLVLSQQNMKYILDYIEDVDCRKHKFGDKVQNPDKCLLEVFDEIIEIVDKYFELFDSRDFREKLRNSRNKFIKLEASKKADTILAILKGLQAKSTRATIKELNISDFGRIITSSISPEAQLIYQSPTGLFERRVKVKDL

SEQ ID NO: 128 - protein, 1140 aa, Roseburia intestinalis
MRENGSDERRRNMDEKMDYRIGLDIGIASVGWAVLQNNSDDEPVRIVDLGVRIFDTAEIPKTGESLAGPRRAARTTRRRLRRRKHRLDRIKWLFENQGLINIDDFLKRYNMAGLPDVYQLRYEALDRKLTDEELAQVLLHIAKHRGFRSTRKAETAAKENGAVLKATDENQKRMQEKGYRTVGEMIYLDEAFRTGCSWSEKGYILTPRNKAENYQHTMLRAMLVEEVKEIFSSQRRLGNEKATEELEEKYLEIMTSQRSFDLGPGMQPDGKPSPYAMEGFSDRVGKCTFLGDQGELRGAKGTYTAEYFVALQKINHTKLVNQDGETRNFTEEERRALTLLLFTQKEVKYAAVRKKLGLPEDILFYNLNYKKAATKEEQQKENQNTEKAKFIGMPYYHDYKKCLEERVKYLTENEVRDLFDEIGMILTCYKNDDSRTERLAKLGLVPIEMEGLLAYTPTKFQHLSMKAMRNIIPFLEKGMTYDKACEEAGYDFKADSKGTKQKLLTGENVNQTINEITNPVVKRSVSQTVKVINAIIRTYGSPQAINIELAREMSKTFEERRKIKGDMEKRQKNNEDVKKQIQELGKLSPTGQDILKYRLWQEQQGICMYSGKTIPLEELFKPGYDIDHILPYSITFDDSFRNKVLVTSQENRQKGNRTPYEYMGNDEQRWNEFETRVKTTIRDYKKQQKLLKKHFSEEERSEFKERNLTDTKYITTVIYNMIRQNLEMAPLNRPEKKKQVRAVNGAITAYLRKRWGLPQKNRETDTHHAMDAVVIACCTDGMIQKISRYTKVRERCYSKGTEFVDAETGEIFRPEDYSRAEWDEIFGVHIPKPWETFRAELDVRMGDDPKGFLDTHSDVALELDYPEYIYENLRPIFVSRMPNHKVTGAAHADTIRSPRHFKDEGIVLTKTALTDLKLDKDGEIDGYYNPQSDLLLYEALKKQLLLYGNDAKKAFAQDFHKPKADGTEGPVVRKVKIQKKQTMGVFVDSGNGIAENGGMVRIDVFRVNGKYYFVPVYTADVVKKVLPNRASTAHKPYGEWKVMEDKDFLFSLYSRDLIHIKSKKDIPIKMVNGGMEGIKETYAYYIGADISAANIQGIAHDSRYKFRGLGIQSLDVLEKCQIDVLGHVSVVRSEKRMGFS

SEQ ID NO: 129 - protein, 992 aa, Treponema vincentii
MQKNSGEDENCGFEFLTEEEKELIKPLFFRISKPSFQFADIEKKLKGKNGFWKFNYRKDTNVSGCPVSAGLKNIFGDEASAESWKDKKVGQYDMCDIWHVLFDFDDEEKLLEFAKRKLFLSDEAAKKFCAIRIQQGYANLSLKAIRKITPFLRKGYIYSTAVFLANIPFMIGRDIFLQNEKEIEDSVKNIIGTLRDKNNIIVLANRCIESAFKDKDNDFRFEEWDKALVENSAWDLFGKKKWNEYDEEKRKTIISQVSEKVEDNLKIAVGKNPNDYKYPLLRTDDLIMDYLNQKGFVVKGELYHPSDTDYNFETPVPAEDGKIYLASPRSPSVKNPVVMRALHQLRKLVNYLIKTGKIDSTTKINVELANDVNDKNQRKAIEELAKTNEKNNADARKKIEELCNEAGFKVVPTESDIKKFRLWKEQNETCPYTGKHISFTDLFGPIPKFDFEHTIPRSLSYDDSLENLTLCDSEFNRNIKKQRLPSELPDFEEINKRFLKFYEDKIDNCLRIIELNSKSGGSYEEPAVKDLRIVKKHKAQYELNYYKEKLRRFSSTEITSGFKHSQLNDTRIITKFSLSYLKGVFDHVQPVKGSMTDTFKRQWGLMERNEIKDRSNHTHHTVDALTVACINRGKFNLLSEAIKNSSDGKHLKFPKPWETFDTDVLNAVRYIIPKYFSDESSLRQSKKILRGRDGKPVLKNGKAVFIQGATARGSLHKDTFYGCIKTVPEKGGKSEMIFVQRIPVSTLDEKVAEKIIDKRIRKTFEKNLSTGIQTLQEIQTDGILLPFKKEGRDVFVKRVRIKAHPTSPIILKKHHNVINKNPKDYKQNYYVENEENYLLAIYRGKDAKGKDVSDHKLCNLLNAVKSRQNKTGFYPDFKEKKGINLQLYKVLKIGKIVILQNDIQEDVFALPKEKLWKRMYRIAGLATSRNDIQIKLVHIIRETPWGYMKGEKDLNAGKECLLYGTANFKGLVEGQDFTVSPAGEIIQKARVC

SEQ ID NO: 130 - protein, 1340 aa, Enterococcus faecium
MKKEYTIGLDIGTNSVGWSVLTDDYRLVSKKMKVAGNTEKSSTKKNFWGVRLFDEGQTAEARRSKRTARRRLARRRQRILELQKIFAPEILKIDEHFFARLNESFLVPDEKKQSRHPVFATIKQEKSYHQTYPTIYHLRQALADSSEKADIRLVYLAMAHLLKYRGHFLIEGELNTENSSVTETFRQFLSTYNQQFSEAGDKQTEKLDEAVDCSFVFTEKMSKTKKAETLLKYFPHEKSNGYLSQFIKLMVGNQGNFKNVFGLEEEAKLQFSKETYEEDLEELLEKIGDDYIDLFVQAKNVYDAVLLSEILSDSTKNTRAKLSAGMIRRYDAHKEDLVLLKRFVKENLPKKYRAFFGDNSVNGYAGYIEGHATQEAFYKFVKKELTGIRGSEVFLTKIEQENFLRKQRTFDNGVIPHQIHLSELRAIIANQKKHYPFLKEEQEKLESLLTFKIPYYVGPLAKKQENSPFAWLIRKSEEKIKPWNLPEIVDMEGSAVRFIERMINTDMYMPHNKVLPKNSLLYQKFSIYNELTKVRYQDERGQMNYFSSIEKKEIFHELFEKNRKVTKKDLQEFLYLKYDIKHAELSGIEKAFNASYTTYHDFLTMSENKREMKQWLEDPELASMFEEIIKTLTVFEDREMIKTRLSHHEATLGKHIIKKLTKKHYTGWGRLSKELIQGIRDKQSNKTILDYLINDDDFPHHRNRNFMQLINDDSLSFKKEIKKAQMITDTENLEEIVKELTGSPAIKKGILQSLKIVDEIVGIMGYEPANIVVEMARENQTTGRGLKSSRPRLKALEESLKDFGSQLLKEYPTDNSSLQKDRLYLYYLQNGRDMYTGAPLDIHRLSDYDIDHIIPRSFTTDNSIDNKVLVSSKENRLKKDDVPSEKVVKKMRSFWYDLYSSKLISKRKLDNLTKIKLTEEDKAGFIKRQLVETRQITKHVAGILHHRFNKAEDTNDPIRKVRIITLKSALVSQFRNRFGIYKVREINEYHHAHDAYLNGVVALALLKKYPQLAPEFVYGEYLKFNAHKANKATVKKEFYSNIMKFFESDTPVCDENGEIFWDKSKSIAQVKKVINHHHMNIVKKTEIQKGGFSKETVEPKKDSSKLLPRKNNWDPAKYGGLGSPNVAYTVAFTYEKGKARKRTNALEGITIMEREAFEQSPVLFLKNKGYEQAEIEMKLPKYALFELENGRKRMVASNKEAQKANSFLLPEHLVTLLYHAKQYDEISHKESFDYVNEHHKEFSEVFARVLEFAGKYTLAEKNIEKLEKIYKENQTDDLAKLASSFVNLMQFNAMGAPADFKFFDVTIPRKRYTSLTEIWQSTIIHQSITGLYETRIRMGK

SEQ ID NO: 131 - protein, 1363 aa, Lactobacillus rhamnosus
MTKLNQPYGIGLDIGSNSIGFAVVDANSHLLRLKGETAIGARLFREGQSAADRRGSRTTRRRLSRTRWRLSFLRDFFAPHITKIDPDFFLRQKYSEISPKDKDRFKYEKRLFNDRTDAEFYEDYPSMYHLRLHLMTHTHKADPREIFLAIHHILKSRGHFLTPGAAKDFNTDKVDLEDIFPALTEAYAQVYPDLELTFDLAKADDFKAKLLDEQATPSDTQKALVNLLLSSDGEKEIVKKRKQVLTEFAKAITGLKTKFNLALGTEVDEADASNWQFSMGQLDDKWSNIETSMTDQGTEIFEQIQELYRARLLNGIVPAGMSLSQAKVADYGQHKEDLELFKTYLKKLNDHELAKTIRGLYDRYINGDDAKPFLREDFVKALTKEVTAHPNEVSEQLLNRMGQANFMLKQRTKANGAIPIQLQQRELDQIIANQSKYYDWLAAPNPVEAHRWKMPYQLDELLNFHIPYYVGPLITPKQQAESGENVFAWMVRKDPSGNITPYNFDEKVDREASANTFIQRMKTTDTYLIGEDVLPKQSLLYQKYEVLNELNNVRINNECLGTDQKQRLIREVFERHSSVTIKQVADNLVAHGDFARRPEIRGLADEKRFLSSLSTYHQLKEILHEAIDDPTKLLDIENIITWSTVFEDHTIFETKLAEIEWLDPKKINELSGIRYRGWGQFSRKLLDGLKLGNGHTVIQELMLSNHNLMQILADETLKETMTELNQDKLKTDDIEDVINDAYTSPSNKKALRQVLRVVEDIKHAANGQDPSWLFIETADGTGTAGKRTQSRQKQIQTVYANAAQELIDSAVRGELEDKIADKASFTDRLVLYFMQGGRDIYTGAPLNIDQLSHYDIDHILPQSLIKDDSLDNRVLVNATINREKNNVFASTLFAGKMKATWRKWHEAGLISGRKLRNLMLRPDEIDKFAKGFVARQLVETRQIIKLTEQIAAAQYPNTKIIAVKAGLSHQLREELDFPKNRDVNHYHHAFDAFLAARIGTYLLKRYPKLAPFFTYGEFAKVDVKKFREFNFIGALTHAKKNIIAKDTGEIVWDKERDIRELDRIYNFKRMLITHEVYFETADLFKQTIYAAKDSKERGGSKQLIPKKQGYPTQVYGGYTQESGSYNALVRVAEADTTAYQVIKISAQNASKIASANLKSREKGKQLLNEIVVKQLAKRRKNWKPSANSFKIVIPRFGMGTLFQNAKYGLFMVNSDTYYRNYQELWLSRENQKLLKKLFSIKYEKTQMNHDALQVYKAIIDQVEKFFKLYDINQFRAKLSDAIERFEKLPINTDGNKIGKTETLRQILIGLQANGTRSNVKNLGIKTDLGLLQVGSGIKLDKDTQIVYQSPSGLFKRRIPLADL

SEQ ID NO: 132 - protein, 1234 aa, Prevotella tannerae
MPNFWSIFTENLQTYLMKTRILGLDTGTNSLGWAVVDRDENNQYTPICRGDLIFTEGVKQEKGIEFSLAAERTSYRASRRHYFRRRLRKVEVLKVLVKHKLCPPLSDEALNRWHTKKEYPLDEDFILWQRTNEADNKNPYHDRHICLHRKLNLKDSQTDRYTLGRALYHLTQRRGFLSNRLDQNEEAEETGKVKSAISELSKEMKEAGCEFLGDYFYLLYRTEGNRVRIRSRYTDREKHYLQEFKEICRVQELDEDLAKALEKTIFFQRPLKSQRQGVGKCTMEKGHSRCAVSHPLYEEYRLLCYLNNIRIKTPSDDRLRPLNAEEREKITPLFYKEKNFDFEKIAKKLAGKTPFGWIRDAEDWPYQFNYRMTQEAPACPTTAQLIKVFGEDWKAALAETYTMSAKQDGTLKTEDEICTDIWNVLYSFSSKEKLKEFGLKKLQLDEVQAKAFSEIRLTRDFASLSLKAIRKILFFLRTGEDYSKAIFLANIPTIVGEEIWNDIERRSRLLYKVDLALRPQEERDAEEHRTIAERIKAAVAAEVPDAPIDLLYHPSMIEAYPDAKRNERFDCYQLGSPKTNAVRNPMAMRSLHMVRKVINHLLRKHIIDEKTEIHIEYARELNDANKRQAIADWQRELSKRHTAYAQNIRQLYKAETGLVIEPTKADILKYQLWEEQQHVCLYTGKKIGIADFLGANPKFDIEHTIPRSRGGDSTQENLTLCESKFNRDIKRDKLPTELANYEEILARIEHWKKQCYALKLKRDGIRTHSGLEKSIKDSRIRRRHLVGLEYGYLKGKYDRFTMKEVPEGFSRRQGAGIGLISKYAGLFLKSLFKDPKNPNRSNVYVVKGAITAEFRKLWGLQQADEAKSRENHTHHCIDAYTIACIGPCEYAALAAYYRSDEEFKYGRRREKPQFEKPWPTFTEDLLKLQEELLIVHQTTDKLGKRDRRKVKTPRGKFLTGGDSARGRLHQETYYGAINYDGNIKYVVRKPLDSLTEKDLDKIVDETVMGIVKGAVEAKGSLKEALADGIYMNKEKGILIKRVRIFSDVSEPINLKQLRDVSTKEYKRHIHLRKDENYLFAIYEGIDKKKNKKQTETATVDYLDAAKFYKDSKRRDKANSLVGDYSKKNKLPLKCILKKRQMVLFYEHSPEEIRFKDKKDLSRRLYIVTSIAKDGRVKFLHHQAATATGIQSSPSPFTNDGEHQPYYRLSASNIKVLVAGIDFDINILGEITPKL

SEQ ID NO: 133 - protein, 1496 aa, Prevotella veroralis
MKTILGLDLGTNSIGWAKVCVDDNGNYLRDIKLGSRIIPMSQDVLGNFDKGVTESQTSVRTGFRGVRRIRERSLLRRERLHRVLHVLGYLPPHYDSAIGWNKNEPSTYGKFLNHGEPKLAWEHKEDGSMRFLFMESFHEMMADFAKSQPSLVSDGKKIPLDWTIYYLRKKALSQPIRKEELAWLLLNFNQKRGYYQLRGEEDDDNPTKCEEYYELKVVGIEADEEGKNGNTWYNVKLENGWIYRRQSKIPLDDWIGKVREFIVTTEYEKDGITLKKDKNGDVKRSFRSPSEDDWGLRKKRTEKLLDSSKMTVGAFVYDHLLAEPSDKIRGKFIRTIERKYYKKELYAILCEQSKYHEELRSGDYLNKCAEELYKNNQPHRNSLLTKDLAYLLLEDLIFYQRPLKTKKSLIAECPYEAYKYVDKETGEIKRQGIKCIAKSNPYYQEFRLWQFISNLRLFNKADDKEVTADYLPTQDDYVRLFAYLNDRKEINQETLLKEFFKLKKITVNSEKVFPIRWNYIEDKEKKYPCNETRHELLLALDRARIDHSWLEKPGQEYRLWHLLYSVESKEETKEALRKLKDDDAFVESFLKVKPFKREYGAYSEKAIKKLLAVMRMGSLWRETDICDTTKGNITKILQGEIDEKLKEKISASVSSYNQLSDFQGLPVWLACYVVYGRHSEAAEIQHWKTPESLLAYINGFKQHSLRNPIVEQCILETLRTVHDIWKEVGHIDEIHVELGRNMKSTADQRARISENVLRNENTNLRIKSLLLELKNDPNIKDVRPYSPMQQEKLRIYEEGVLQELTKDDKDFTEITKISTMAQPSAKELQRYKLWLEQKYRSPYTGKSISLTKLFTSAYQIEHVIPQSRYFDDSFSNKVICESEVNSLKDNMLGYEFIKNHGGEIIHCTMLGDVKVLSESEYKAFVNDHYAHNKRKRENLLLEDIPQEFLNRQMNDSRYISKVVKALLSNIVRAEGEEEATSKFVVSCSGGITDRLKKDWGLNDVWNKIVYPRFERLNRLTGTEAFGQWENKDGKRVFQTAVPLELQRGFNKKRIDHRHHAMDALVIACTSRNIINYLNNESANNPKKREDLRQKLCDKNRTIRKPWETFTQDATAALEDVIVSFKNYVRIINKATNYYERYDVEGKKVIAEQRGDDMWAIRKPMHEATYYGRVNLRRKKKVNLRVALENISSICDNKLRIYINGLVEKGFNTKQILDKFKNTNDHFSMQKIDKVEIWQFTNEEEKLVATRKPLDTSFDTKKIASITDTGIQTILLNYLETKGGDSTIAFTPEGIVEMNQNISKYNNGKEHMPILKVRLYTKLGKKIPVGQTGCKAKQFVIAEAGTNLYFAIYEDEEGKRSYRTIPLNEVVERLKQGLSPVPEKNDKDVHLKFYLSPNDLVYVPIEDEHESLAKDHIYKFVDSSGTTANFIPHRSANVIFELNKKDAEKFCSGSIIQNEYGVGSSQSKNQKAITGEMIKAVCRKLEVDRLGNVIKVI

SEQ ID NO: 134 - protein, 1082 aa, Neisseria cinerea
MAAFKPNPMNYILGLDIGIASVGWAIVEIDEEENPIRLIDLGVRVFERAEVPKTGDSLAAARRLARSVRRLTRRRAHRLLRARRLLKREGVLQAADFDENGLIKSLPNTPWQLRAAALDRKLTPLEWSAVLLHLIKHRGYLSQRKNEGETADKELGALLKGVADNTHALQTGDFRTPAELALNKFEKESGHIRNQRGDYSHTFNRKDLQAELNLLFEKQKEFGNPHVSDGLKEGIETLLMTQRPALSGDAVQKMLGHCTFEPTEPKAAKNTYTAERFVWLTKLNNLRILEQGSERPLTDTERATLMDEPYRKSKLTYAQARKLLDLDDTAFFKGLRYGKDNAEASTLMEMKAYHAISRALEKEGLKDKKSPLNLSPELQDEIGTAFSLFKTDEDITGRLKDRVQPEILEALLKHISFDKFVQISLKALRRIVPLMEQGNRYDEACTEIYGDHYGKKNTEEKIYLPPIPADEIRNPVVLRALSQARKVINGVVRRYGSPARIHIETAREVGKSFKDRKEIEKRQEENRKDREKSAAKFREYFPNFVGEPKSKDILKLRLYEQQHGKCLYSGKEINLGRLNEKGYVEIDHALPFSRTWDDSFNNKVLALGSENQNKGNQTPYEYFNGKDNSREWQEFKARVETSRFPRSKKQRILLQKFDEDGFKERNLNDTRYINRFLCQFVADHMLLTGKGKRRVFASNGQITNLLRGFWGLRKVRAENDRHHALDAVVVACSTIAMQQKITRFVRYKEMNAFDGKTIDKETGEVLHQKAHFPQPWEFFAQEVMIRVFGKPDGKPEFEEADTPEKLRTLLAEKLSSRPEAVHKYVTPLFISRAPNRKMSGQGHMETVKSAKRLDEGISVLRVPLTQLKLKDLEKMVNREREPKLYEALKARLEAHKDDPAKAFAEPFYKYDKAGNRTQQVKAVRVEQVQKTGVWVHNHNGIADNATIVRVDVFEKGGKYYLVPIYSWQVAKGILPDRAVVQGKDEEDWTVMDDSFEFKFVLYANDLIKLTAKKNEFLGYFVSLNRATGAIDIRTHDTDSTKGKNGIFQSVGVKTALSFQKYQIDELGKEIRPCRLKKRPPVR

SEQ ID NO: 135 - protein, 1512 aa, Fibrobacter succinogenes
MKKILGLDLGTNSIGWAVVNADEITRDDGSRYLKPNGISAAGSRIIPMSADILGDFEKGNSISQTAERTRMRMARRLHERALLRRERLLRVLNLLDFLPKHFADKIDRYGKFTDDSEPKLAWRKNTEGKYEFIFQDAFNEMLAEFKDKQPEIVEEGKKIPYDWTIYYLRKKALEKALSKEELSWILLQFNQKRGYYQLRGEEEEIPQDKKIEYLAQKVVKVEATDQKKGDDVWYNVYLENGMIYRRTSKAPLDWEGKVKEFIVTTEVENDGETPKKDKEGNIKRSFRAPKEDDWTLLKKKTEADIENSHKTVGCYIYDSLLNNPKQKIIGKLVRTVERKFYKEELTQILKKQVELIPELRDDNLYKQCIEELYPINEAHRNTIAKTDFANLFINDILFYQRPLKSKKSQIDNCPYEERIFIDSKTGEKKKVPVKCIAKSNPLFQEFRLWQFIQNLRIYQREKEIDGKLLTDIDITSECLKSEEDYVRLFDWLNDRETIEQEDLLKHLFNTKKSKNKENPYRWNYVEDKVYPCNETRATILKGFSKCGINASVLSPELEMALWHILYSVEDKKEIETALTHFAQKQGWNDDFAKVFSKAKPFKKDYGSYSEKAIKKLLSLMRMGKYWNQDNIDKNTLDRIDKIINGEYDEKISNRVRDNAINLKDISDFRGLPVWLACYIVYDRHSEAKDCTKWNSPEEIDSYLKKFKQHSLRNPIVEQVVTETLRTVRDIWIQEEQIDEIHLELGRDLKNPADKRKKMSENILKNENTNLRIKAMLMEFMNPSMGIENVRPYSPSQQDILRIYEENALDNLTKDDKDFDFISKISKQAQPSKTDIIRYKCWLEQKYRSPYTGKTISLSKLFTPAYEIEHVIPQSLYFDDSFSNKVICEAEVNKLKDRQLGYKFIAEHHGEKVQLSQGEVVEILSVDAYEKFVKENYANNRIKMKKLLMESIPDEFIERQLNDSRYISKVVKGLLSNIVREKIDDENYEPEAVSKNLISCNGAITDRLKKDWGMNDVWNSIILPRFIRMNQITGKDCFTTTNAEGHLIPQMPLELQKGFNKKRIDHRHHAMDAIVIACTTRDHVNLLNNEAAHSKFNATRYQLQRKLRRFEKAVIDGKEREVAKEFLKPWDSFSSDSKNILENIIVSFKQNQRVINKTTNAFLHFDENGKKTFIKQGKGDSWAIRKSMHKDTVFGEINLRKVRSVSLNEAIKVPERVLNKKIKEKILELKNNKIDAKNIKKYIEENHTGGYGIDSSKIDVFYFTKETKERFFATRKTLDTSFNQAKIKDSIADSGIQKILLAHLKSKNGDAEQAFSPDGIDEMNKNIVELNNGKFHQPILKVRVYEKADKFAVGQKGNKKVKFVEAAKGTNLFFAIFEKDGKRSYLTIPLNVMIDCQKQYGNQWKNNIEAYLKEKELVEKDVKLQFILSPNDLVYLPTEGSIDKKRIYKVVSFTNNRLYAIPYAIAKSIVDKNEFTQLNKIEFTDNKESIKDACVPVIIDRLGNVIEFNGKRL

SEQ ID NO: 136 - protein, 1259 aa, Streptobacillus moniliformis
MKYILGLDLGVASIGWAVTEINEKGEPVGLIDANSVIFKPLDNDKGKLYNVERRDKRGSRRILRRKKHRVERTKMLLVNSSFLTNEEIDNLYVGKLDNIYEVRLKGLKEQLSKNEIARLMIYYCKNRGFKSNRKTEDLEILKSLGEKISEKDSDEKKLKPIIAKNTELIESKGLTPIEVIYMIRENDNSILGFKNKEGNYKFGFKRNQVIDEVRKILGTQQILSKEIVDEYIDILSSQRDFSDGPGGDSKYKIDYTKLAGKCKYTGEVRAVKSAPSYEIFTMLQKLNDIRYVKFTSEDKIEKKKLSKEVIHKLYDLVVEKNKTLTYDLIEKSIDEENIKLLNIPKLSKSKYVELRKSYFKERNDNENLTEEEINAFNEKLNNERMKQELIRNNLKAYKELKSKFKKNNIDENRIKELGGIYFLDLVAELLTYSKTDEKLEYFVENVERYSLFKEQRDIVEIIKTFPNYTKNGNLSLSLVRELNKLLMEGHDYESSLSSLNYYIDTDVDWEKFPTISEIEDSLSTKITNPNVKHILVILRKLYNTLLFKYGRPEKVHLELSRDFSNDFSTRNKIQKEQLENKVRREVAAFEMYGANKDIVAGKDRLSNDDFVRIKLWEEQNKVCMYSGRTIEKYQLTSAEVQIDHILPYSKSFDNSYSNKVLVFSNENQDKKERTPYQWLKGTEKWNEFKQRVRLNLNISNKKKENLLFEDEVVNNEFLERELHATSYSSRLALNIFQRLIPVSDEDKYDEHGNEKVKYLYNRNVIAFQGKMTSMLRNLYSLNKYTHSFESDTLDIDNKAFILKEFEINKDNLKMTAYNVNTGLEITSETKVEKNKSGEFKTIKDELLKKELDKKENLIEISDYFKDKVLFDLKIVDFEEIDTVEPEIISILYKMITALKEEVYSKNRENHLHHSLDAFLLTIMNRSMQMKLIKYNQLISVLKNKEIEIFNEEKGEYIDSKEFAEELQKQKIIDIDGNERGIKFNVNGKTHRLNLVKPYENFLDDIKNKIFDKRENNKLPYHVVKSKVSGALHAETILGESKGEITKRISVFDINYKNLGKIFDKDGSQKEIYETLVKWLEAKSKDYPKLKNGNIIKKVKIVDGNKDKLIKLGNKRYVEMGRTTVKILVLKKEAEEGLKFASIGRYKYNLLKSEKDVNISIWKDAIHFCKVRYNKLKENGYRLIHELIPGETIELELNKGNISKCLVVGFSGGKIEISSVIGDALDLINDKISTRIKERYYITVSTIKSIKKINKNILGD

SEQ ID NO: 137 - protein, 1091 aa, Mobiluncus mulieris
MDSRKYRVGIDVGTNSVGFAAVEEDDSGSPTRFLNTMVVIHDSGVDPEQKKYAITRLASAGTARRTRRLYRTRRQRLRELDDFISNELGYPLVNLENFADPYEPWKVRADLATTKLPNDELPEAMSIALRHMARHRGWRSPYQRVEALHLHAEISKEFAALKERVVEKTGDVFSDDATPAEVLVDLMGRQKVRGADGVLSGKLRQSDNANELRKIASVQGIDDETLNRIIDRVFSSKSPKGKASERVGMDALPGQGSKPRALKAMPSFQKFRVVSVICNLRIKDSGGDARPLSMEEKEKLIDYLMSSTTDDHVTWTDVADLLHVKRSQLQGTAKEGFDGERPYTRPPVNSTWSKIKDSKIKSLVALWKTGDVDVQSAIVEALSNASVLEDSRPGADIVVAYLESLDDKELESLDKVGLPAGRASYSEDSLERLTERMLRDDCDLFEARKREFNVADDWKPPADPIYAPVGNPGVDRVLKIVNRLLMAAEREWGAPTQINIEHVRSGFSSELMQREFERENERRRAQNEEAVKAILTEKGGNSRVSKYDITRYYAVKRQHCQCLYCGTPITFSDCELDHIVPRKGVGSTNTRVNLAAACRSCNRDKSNLPFAVWAGKASNFDVSIDDAVSRVKQWQRSQNEGVREFRAFQNEVISRLLKTTEDPEIDSRSLESVAWMARELHHRVEYYFQSKGAQTQVSVYRGAVTAQARKSSGLEDKVKMIGGGGKTRLDRRHHAMDAATIALMTPGISTTLSEKNNLRDAQKFTGQSETWKDYCGRTETARKHFAVWKSNMERLTDLFNDKLENDAIPVVQPLRLRLSNSKAHDDGIGKLDSKKLGSVWSLADIDRAATPQIWTALTRCDDFDPTKGLPENANRVIRAQGVKYESEDNIPVFPSNVAAIAVRDGYAEIGSTIHHARIYRIDDGKKTFYSMIRVFAVDLLKHQAEDLFTVKLPPSAISIRTCEDSLRRALSNGTAEYLGWLVPGDEIIVDTSDKAFHTGQIGDLLRNFPVNSFRLTGFPSNSRLRLKPVLLAGEGLRDDAEDSIKKILLGQGWRPAINVLFSKGKPRIVRRNSLGIERPSSNNGLPFSWEA

SEQ ID NO: 138 - protein, 872 aa, Candidatus Parvarchaeum
MLGSSRYLRYNLTSFEGKEPFLIMGYYKEYNKELSSKAQKEFNDQISEFNSYYKLGIDLGDKTGIAIVKGNKIILAKTLIDLHSQKLDKRREARRNRRTRLSRKKRLARLRSWVMRQKVGNQRLPDPYKIMHDNKYWSIYNKSNSANKKNWIDLLIHSNSLSADDFVRGLTIIFRKRGYLAFKYLSRLSDKEFEKYIDNLKPPISKYEYDEDLEELSSRVENGEIEEKKFEGLKNKLDKIDKESKDFQVKQREEVKKELEDLVDLFAKSVDNKIDKARWKRELNNLLDKKVRKIRFDNRFILKCKIKGCNKNTPKKEKVRDFELKMVLNNARSDYQISDEDLNSFRNEVINIFQKKENLKKGELKGVTIEDLRKQLNKTFNKAKIKKGIREQIRSIVFEKISGRSKFCKEHLKEFSEKPAPSDRINYGVNSAREQHDFRVLNFIDKKIFKDKLIDPSKLRYITIESPEPETEKLEKGQISEKSFETLKEKLAKETGGIDIYTGEKLKKDFEIEHIFPRARMGPSIRENEVASNLETNKEKADRTPWEWFGQDEKRWSEFEKRVTSLYSKKKISERKREILLNKSNEYPGLNPTELSRIPSTLSDFVESIRKMFVKYGYEEPQTLVQKGKPIIQVVRGRDTQALRWRWHALDSNIIPEKDRKSSFNHAEDAVIAACMPPYYLRQKIFREEAKIKRKVSNKEKEVTRPDMPTKKIAPNWSEFMKTRNEPVIEVIGKVKPSWKNSIMDQTFYKYLLKPFKDNLIKIPNVKNTYKWIGVNGQTDSLSLPSKVLSISNKKVDSSTVLLVHDKKGGKRNWVPKSIGGLLVYITPKDGPKRIVQVKPATQGLLIYRNEDGRVDAVREFINPVIEMYNNG

SEQ ID NO: 139 - protein, 1229 aa, Pediococcus acidilactici
MGDRKYNLGLDIGTSSIGFAAVDENNQPIRVKGKTAIGVRLFEEGKTAADRRGFRTTRRRLSRRRWRINLLNEIFDAHLAEVDPTFLARLKESNRSNLDPKKSFQGSLLFPERKDYQFYEEYPTIYHLRKALMEKDRKFDIREIYLAVHHIIKYRGNFLNGTPMRSFKVENIELNTLFDQLNQLYAEIVPDNELAFDLAQVADVKDVLSSTTIYKMDKKKQLVKMMLLPASNKALQSENKKIVTQFVNAILNYKFKLDVLLQVETDADWSLKLNDEGADDKLEEFTGDLDENRLEIIDLLQRLHNWFSLNEITKDGNSLSAAMVEKYENHHHHLGLLKKVIENHPDAKKAKALKETYTAYVGKTDDKTQNQDDFYKAVEKNLDDSPDAKGIKRLIQLDQFMPKQRTGQNGAIPHQLHQQELDQIIEKQSKYYPFLAEPNPNVKRRKDAPYKLDELIAFKIPYYVGPLVTPEEQAQNKENVFAWMKRKAAGPITPWNFDEKVDRMESANRFIRRMTTKDTYLFGEDVLPAESMIYQKFVVLNELNNLKINGRHLSLKDKQDVYNDLFKQQKTVSIKALQNYYVTKKKAATAPTVGGLADPKKFLSSLSTYIDFKNMFGERVNDPQFQEDLEQIVEWSTIFEDRGIFKAKLQALGWLSEKQIQQLVAKRYKGWGRLSKKLLTGLKNAEGYSILDEMWRSTENFMQIQSRPEFAALIQQANEKQFEGNDPDNVWENIENILGDAYTSPQNKKAIRQVVKVVQDIEKAVGNPPEKIAIEFTREAAANPQRTQSRLRTLEKLYESAEEVVDAGLTAELAEFKENKHVLSDKYYLYFTQLGRDVYTGDTISLDKLNDYDVDHILPQSFIKDDSLDNRVLTIRAVNNGKSDNVPAKMFGKKMGSFWRHLLDNGMISKRKYNNLITDPDNISKYAQKGFINRQLVETSQVIKLTANILNGIYDKDTEIIEVPAKMNSQMRKMFDLVKVREVNDYHHAFDAYLTIFIGNYLYKCYPKLRPYFVYDNFKKFGNKEDIGHKRFNFLGKIEREKKVVAPETGEILWSNVAPNETIKQIKKVYNYKFMIVSREITTRRAELFNQTVYPKNYRGKLIPIKEDRPTDLYGGYSGNTDAYLAIVALEDKKKGKYFKVVGIPTRAAAKLEKLKQQDSQQYLQALHEVIAPQFTKSTKKGIKKTEFEIVLDKVHYRQLVQDGPVKMMLGSSTYKYNAKQLVLSEKAL

SEQ ID NO: 140 - protein, 1398 aa, Veillonella parvula
METQASNQLISSHLKGYPIKDYFVGLDIGTSSVGWAVTNKAYELLKFRSHKMWGSRLFDEGESAVARRGFRSMRRRLERRKLRLKLLEELFADAMAQVDPTFFMRLRESKYHYEDKTTGHSSKHILFIDKNYNDQDYFKEYPTVYHLRSELMKSGTDDIRKLFLAVHHILKYRGNFLYEGATFDSNASTLDDVIKQALENITFNCFDCNSAISSIGQILMEAGKTKSDKAKAIEHLVDTYIATDTVDTSSKTQKDQVKEDKKRLKAFANLVLGLNASLIDLFGSVEELEEDLKKLQITGDTYDDKRDELAKAWSDEIYIIDDCKSVYDAIILLSIKEPGLTISESKVKAFNKHKDDLAILKSLLKSDRSIYNTMFKVDEKGLHNYVHYIKQGRTEETSCNREDFYKYTKKIVEGLSDSKDKEYILSQIELQILLPLQRIKDNGVIPYQLHLEELKAILAKCGPKFPFLNEVADGFSVAEKLIKMLEFRIPYYVGPLNTHHNVDNGGFAWAVRKASGRVTPWNFDDKIDREKSAAAFIKNLTNKCTYLLGEDVLPKSSLLYSEFMLLNELNNVRIDGKPLEKVVKEHLIEAVFKQDHKKMTKNRIEQFLKDNGYISETHKHEITGLDGEIKNDLASYRDMVRILGDGFDRSMAEEIITDITIFGESKKMLRETLRKKFASCLDDEAIKKLTKLRYRDWGRLSQKLLNGIEGCDKAGDGTPETIIILMRNFSYNLMELLGDKFSFMERIQEINAKLTEGQIVNPHDIIDDLALSPAVKRAVWQALRIVDEVAHIKKALPARIFVEVTRSNKNEKKKKDSRQKRLSDLYAAIKKDDVLLNGLNNEIFGELKSSLAKYDDAALRSKKLYLYYTQMGRCAYTGEIIELSLLNTDNYDIDHIYPRSLTKDDSFDNLVLCKRTANAQKSDAYPISEEIQKTQKPFWTFLKQQGLISERKYERLTRITPLTADDLSGFIARQLVETNQSVKAATTLLRRLYPGVDVVFVKAENVTDFRHDNNFIKVRSLNHHHHAKDAYLNIVVGNVYHERFTRNFRAFFKKNGANRTYNLAKMFNYDVNCTNAKDGKAWDVKTSMDTVKKMMDSNDVRVTKRLLEQTGALADATIYKATVAGKAKDGAYIGMKTKSSVFADVSKYGGMTKIKNAYSIIVQYTGKKGEVIKEIVPLPIYLTNRNTTDQDLINYVASIIPQAKDISIIYGKLCINQLVKVNGFYYYLGGKTNSKFCIDNAIQVIVSNEWIPYLKVLEKFNNMRKDNKDLKANVVSTRALDNKHTIEVRIVEEKNIEFFDYLVSKLKMPIYQKMKGNKAAELSEKGYGLFKKMSLEEQSIHLIELLNLLTNQKTTFEVKPLGITASRSTVGSKISNQDEFKVINESITGLYSNEVTIV

SEQ ID NO: 141 - protein, 1485 aa, Prevotella bivia
MKNILGLDLGTNSIGWAKISIDDNGKYIKDSIKLGSRIIPMSQDVLSNFSKGVTLSQTSERTSFRGARRLRERTLLRRERLHRILHLLGFLPKHYEKAIGWDRNDNKTYGKFINHAEPKLAWCKDNNGKMRFLFMDSFHDMLSEFSEKHPELLANGKKIPLDWTIYYLRKKALYKAITKEELAWILLNFNQKRGYYQLRGEEDRDSEANKKEYLELKVIGVEATGEKKGNDIWYNIHLENGWIYRRSSKNPLNDWLGKVKSFIVTTDLDADGNPKKDKDGNIKRSFRAPSEGDWTLIKKRTESLLENSGQTVGQFIYNHILEEPSAKIRGNFIRTIERKYYKDELKAILEKQKEFHHELSSESLLTECAKELYKRNIAHQEVLLKKGIIHLLLNDILFYQRPLKIKKSLIDNCPYENYKYVDKKSGDIKVKSIKCIAKSNPFFQEFRLWQFVSNLRLYRKSDDKDVTSEHLVTTDDYANLFTYLNNRKDIKQSVLLKEYFKIKKVKTINGAEYPVRWNYIDDDNKTYPCNETRYDILHALSKTELKSEWLTPERTYRLWHLLYSIESKEETKKALNKLNLSDDFTEAFLTIKPFKKEYGSYSEKAIKKLLSLMRMGYLWSEDEAIKQVGAEIEKTIEGELPDYVLQRLEKSQHNYNKISDFSGLPLWLASYIIYGRHSEAKEIIHWDNPESMMAYIKDFRQHSMRNPIVEQCVLETLRTVHDIWKEIGHIDEIHIELGREMKSTSEQRKAITQNVLHNQNTNIRIKLLLQELKNDNNITGVRPYSPMQQEILRIYEEGALQGLTKEDKDYNDILKISQTAQPTSNELTRYKLWLEQKYRSPYTGKAISLSKLFTSAYQIEHVIPQSRYFDDSLSNKVICESEVNTLKKAMLGMEFIKTCGGQKVHCTLLGDVEIYNEEDYKAFVNEHYSNNRTKRNKLLMEDIPQEFINRQLNDSRYISKMVKQLLSAIVRGQEEVEATSKFVIPCTGGITDRLKKDWGLNDIWNNLVSPRFQRMNALTGSEYFGHWENKEGKRVFQTTMPIQLQQGFSKKRIDHRHHAMDALVIACASRNIISYLNNETAQDTERRRDLRQKLCDKGGSVRKPWDSFTQDTQYALKDIIVTFKNYVRIINKATNYYEHYKTDGKKGMISQKGDELWAIRKPMHKETVFGKVNLRRPKRVSLSKAIDSVDIICNRKLKKYIKARLNEGLQKKQILNIFKELNNVWEGIDVNKIDIWEMSNDKEPMVATRKQLDTSFDEKKIRSISDTGIQKILLNYLITKNNNPELAFTPEGIQEMNSNISEYNDHKKHQPIYKVRVTEPLGAKYPIGTMGNNPKKFVEAQAGTNLYFAIYEDKEGKRNYDTIPLNIAAERLNQQLSPVPETNENNTPLKFYLSPNDLVYVPSEEERHSGNNIQLDKNRIYKMVSSTSKRCFFIHHRVAISLVDKKEFSAQNKMERSIDNEQVMIKSVCWKLITDRLGNIIKVIK

SEQ ID NO: 142 - protein, 1218 aa, Prevotella buccalis
MNKRILGLDTGTNSLGWAVVDWDEHAQSYELIKYGDVIFQEGVKIEKGIESSKAAERSGYKAIRKQYFRRRLRKIQVLKVLVKYHLCPYLSDDDLRQWHLQKQYPKSDELMLWQRTSDEEGKNPYYDRHRCLHEKLDLTVEADRYTLGRALYHLTQRRGFLSNRLDTSADNKEDGVVKSGISQLSTEMEEAGCEYLGDYFYKLYHEQGNKVRIRQRYTDRKKHYQHEFDAICEKQELSSELIEDLQRAIFFQLPLKSQRHGVGRCTFERGKPRCADSHPDYEEFRMLCFVNNIQVKGPHDLELRPLTYEEREKIEHLFFRKSKPNFDFEDIAKELAGKKNYAWIHDKEERAYKFNYRMTQGVPGCPTTAQLKSIFGDDWKTGIAETYTLIQKKNGSKSLQEMVDDVWNVLYSFSSVEKLKEFAHHKLQLDEENAEKFAKIKLSHSFAALSLKAIRKFLPFLRKGMYYTHASFFANIPTIVGKEIWNNEQSRKYIMENVGELVFNYQPKHRDVQGTIEMLIKDFLANNFELPAGATDKLYHPSMIETYPHALRNEFGILQLGSPRTNAIRNPMAMRSLHVLRRVVNQLLKESIIDENTEVHVEYARELNDANKRRAIADRQKEQDKQHKKYGDEIRKLYKEETGKDIEPTQTDVLKFQLWEEQNHYCLYTGEQIGITDFIGSNPKFDIEHTIPQSVGGDSTQMNLTLCDNRFNREVKKAKLPTELANHEEILTRIEPWKNKYEQLVKERDKQRTFAGMDKAVKDIRIQKRHKLQMEIDYWRGKYERFTMTEVPEGFSRRQGTGIGLISRYAGLYLKSLFHQADSRNKSNVYVVKGVATAEFRKMWGLQSEYEKKCRDNHSHHCMDAITIACIGKREYDLMAEYYHMEETFRQGRGSKPKFSKPWATFTEDVLNIYKNLLVVHDTPNNMPKHTKKYVQTSKGKVLAQGDTARGSLHLDTYYGAIERDGEIRYVVRRPLSSFTNPKELENIVDETVKRTIKEAIADKNFKQAIAEPIYMNEDKGILIKKVRCFANSVKQPINIRQHRDLSKKEYKQQYHVMNENNYLLAIYEGLVKNKVVREFEIVSYIEAAKYYKRSQDRNIFSSIVPTHSTKYGLPLKTKLLMGQQVLMFEENPDEIQVDNTKDLVKRLYKVVGIEKDGRIKFKHHQEARKEGLTIYSTPYKNNDDYVPIFRQSIKNINILVDGIDFNIDILGKVTLKE

SEQ ID NO: 143 - protein, 1218 aa, Prevotella timonensis
MNKRILGLDTGTNSLGWAVVDWDEHAQSYELIKYGDVIFQEGVKIEKGIESSKAAERSGYKAIRKQYFRRRLRKIQVLKVLVKYHLCPYLSDDDLRQWHLQKQYPKSDELMLWQRTSDEEGKNPYYDRHRCLHEKLDLTVEADRYTLGRALYHLTQRRGFLSNRLDTSADNKEDGVVKSGISQLSTEMEEAGCEYLGDYFYKLYDAQGNKVRIRQRYTDRNKHYQHEFDAICEKQELSSELIEDLQRAIFFQLPLKSQRHGVGRCTFERGKPRCADSHPDYEEFRMLCFVNNIQVKGPHDLELRPLTYEEREKIEPLFFRKSKPNFDFEDIAKALAGKKNYAWIHDKEERAYKFNYRMTQGVPGCPTIAQLKSIFGDDWKTGIAETYTLIQKKNGSKSLQEMVDDVWNVLYSFSSVEKLKEFAHHKLQLDEESAEKFAKIKLSHSFAALSLKAIRKFLPFLRKGMYYTHASFFANIPTIVGKEIWNKEQNRKYIMENVGELVFNYQPKHREVQGTIEMLIKDFLANNFELPAGATDKLYHPSMIETYPNAQRNEFGILQLGSPRTNAIRNPMAMRSLHILRRVVNQLLKESIIDENTEVHVEYARELNDANKRRAIADRQKEQDKQHKKYGDEIRKLYKEETGKDIEPTQTDVLKFQLWEEQNHHCLYTGEQIGITDFIGSNPKFDIEHTIPQSVGGDSTQMNLTLCDNRFNREVKKAKLPTELANHEEILTRIEPWKNKYEQLVKERDKQRTFAGMDKAVKDIRIQKRHKLQMEIDYWRGKYERFTMTEVPEGFSRRQGTGIGLISRYAGLYLKSLFHQADSRNKSNVYVVKGVATAEFRKMWGLQSEYEKKCRDNHSHHCMDAITIACIGKREYDLMAEYYRMEETFKQGRGSKPKFSKPWATFTEDVLNIYKNLLVVHDTPNNMPKHTKKYVQTSIGKVLAQGDTARGSLHLDTYYGAIERDGEIRYVVRRPLSSFTKPEELENIVDETVKRTIKEAIADKNFKQAIAEPIYMNEEKGILIKKVRCFAKSVKQPINIRQHRDLSKKEYKQQYHVMNENNYLLAIYEGLVKNKVVREFEIVSYIEAAKYYKRSQDRNIFSSIVPTHSTKYGLPLKTKLLMGQLVLMFEENPDEIQVDNTKDLVKRLYKVVGIEKDGRIKFKYHQEARKEGLPIFSTPYKNNDDYAPIFRQSINNINILVDGIDFTIDILGKVTLKE

SEQ ID NO: 144 - protein, 1487 aa, Prevotella timonensis
MKNILGLDLGSNSVGWALVKVEENGNPIGSIKMGSRIIPMSQDILGSFEKGDTVSQTAQRTLYRGKRRLIERHVLRRERLCRVLHIMNFLPAHFDRLLGWDKTDNKTYGKFIDDSEPKLAWRQNKNEMGKMEFVFMDSFHEMLSDFAKHQPQLIANGKKVPLDWTIYYLRKKALTQLISKEELAWILLNFNKKRGYYQLRGEEEEEQPTKKEEYKVLKVISVDADEGQKGNGIWYNIHLEDGGIYKKKSDIPLYDWVGKTLQLIVVTTYEKDGKTPKIFDSGKQNPSYRLPKEDDWGLVKKRTESQLQSSGKTVGAFIYDNILSKPDDKIRGNLVRTIERKYYKKELIEILQQQAKYHDELHNQNLLESCAKELYAHNDVHYNEVIKSNMINLLVNDIIFYQRPLKSKKSLIANCKYESYEYVDKETGEIKEMPIKCIAKSNPYYQEFRLWQFIHNLRLSDVVTREDVTAQYLSTPQDYCNLFTYLNDRKEIKQDILLKDFFKIKKVQIDKEKVFPIEWNYIKDATKSYPCNETRYELLSALKRAGMDKQWLDDTPNMQYRLWHLLYSVEEKEESAKALRKLYDDDKFVTSFLKIKPFNKCYGAYSEKAIKRLLTLMRMGKAWNEQAIDAKTLKCIQQIITDNVDSKLKEKIDDSRYVLHHVSDFQGLPTYLASYVIYGRHSEVTDIQCWDSPEDLLKFIRDFKQHSLRNPIVEQVILETLRVVYDIWKAEKHIDEIHVEVAREMKLTAQQRNEANLRNLNNEATNLRIKYLLEELKNDTFIKDVRPLSPIHQEKMRIYEQAVLGNLNKQDKDYDDIIKISKKEHPTNAELIRYKLWLEQRYCSPYTGKAISLSKLFTTAYEIEHIIPQSRYFDNSFNNKVICEAEVNKAKGNMLGYEFIKKQGGQKIYCTQLGKAVTILKEEAYKQFVNEHYAHNKRKRDNLLAENIPESFSSRQLNDTRYITKTIMSLLSNVVRQQSEEEATAKNLLPSSGSVTDRLKNDWGLKDVWNTIVTPRFERLNKLSGTNDFGEMKEENGNRYFQTNVPLEYEKGFKKKRIDHRHHAMDALVIACTTRNMVNYISNANANSPKQREDLRQLLCDKNRIINKPWDTFTQDALKALNDIVVSFKNNVRIINRATNRYQRYDKNGKKIIFSQKGDDMWAIRKSMHKETVFGRVNLIRKEVLPIAKALDNISAICNAQLRAYVNDLVDKHFNKKQLVAHFKSLNYKWNRQDVSKVEVWISSDNKTPMVAVRKPLDTSFDKKKIASITDTGIQTILLNYLESKGGDASVAFAPEGIQEMNSNIELYNNGKAHKPIKNVRLSEPLGAKYQVGERGAKTKKYVEADKGTNLFFAIYEDEEGKRYYYSVPLREAIERQKQKLSPVPEYNEKGVALKFYLSPNDLVYVPTEEERTMGTCHIDKARIYKMVSSTGCSCYFVPSTFAKVIVDKVELQSLNKMEKAITDECIKEVCWKLKVDRLGNIINVIK

SEQ ID NO: 145 - protein, 1138 aa, Bifidobacterium dentium
MLCRCHRRYRIGIDVGLMSVGLAAIEVDETGFPIRILNIQSVIHDGGIDPQLGKKKSISRKAISGVARRTRRMRRRKVVRLRQLDATLESLGFPIVEPDSLDTWEIWLTRAKLASSYIQDDETRKEDVSIALRHIARHRGWRNPYSNVESLFVDVAPSEQYEELRRKAEEKLGTSLSGNPTSAEIVECILKRQVGEVQLRTRSRKGVNGNAVEKEGLLPTKLMQSDNAAEIRRIFKVQRIDDETGRKLLRAVFKACSPKGSVERRVGRDALAPGLPRALKASLAFQEYRIANVLTNLVISEDGTKRKLTIAEKQRVFGFLSSNETDDITWIDVAEKLGLERRQIQGVGCLTADGEERISSTPPRNITALHIHSAKPVIREKLVAWWKAASPTVRETMVELLSNTVDIDRVREDMDYSSAVAFIDSLGDEELTALDSVDLLSGRAAYSRQTLKQLTERMLNTDDDLHEARKAVFGVDDNWKPPVDAISTSVGNPAVDRVLKIVNRYLLACQKRWRNPQSVQIEHVRESFSSVAKAKETERVQGERARYRNDLRRELCEQEGLNKIRESDIRRWESVQRQNGTCLYCGSPITFRTCEMDHIVPRKGVGSTNTRVNLAAACAACNKLKSNTAFSVWARTEGAANRKVSQRDAIERVKTFIFNKSVPPREQRAFKQAVISRLRQAESDPAIDNRSIESVAWMADELHRRIEAYFNQDADVSGNTPATQVWVFQGRVTALARKASGIEGRIHFAGEWKKTRLDRRHHAVDAAVIAMMNHSAAQTLVERDSLRLSQWITRKPETWKNYPFSEGQKKTRFKEWLDCMNALLDLLNDALDSDRVPVTRCQRMSLGNSQAHAATIRKMKRVELFSPMDADLIRRASTPALYCALTRLPEYSPEKGLPENRGREIVLNGRHIRSTETVDFFASGAAQLMVRNGSAEIGDSIHHMRIYRYRKTGAKSQEYVYGMIRVFQIDLLHASSENLFAVQLPSQSVSVRYGDKNVVQAIQEGRAEYLGHIVPNDEILISYEGVRMKDSEKIGAYANDFSGTASELAQRRHWVVVGSDVSKLALRPSYLSEEGLENSGSESERLSKQTRKVIEGKGWVVAVNILAKYHPVVIRRNALGEPRFRTNSGMPVSWRWDR

SEQ ID NO: 146 - protein, 587 aa, Neisseria subflava
MATSRSRIRSQTDAFGVVGSLVAFNQTSRLFVAKKNEGETADKELGALLKGVADNAHALQTGNFRTPAELALNKFEKESGHIRNQRGDYSHTFNRKDLQAELNLLFEKQKEFGNPHVSDGLKEGIETLLMAQRPALSGDAVQKMLGYCTFEPTEPKAAKNTYTAGRFIWLTKLNNLRILEQGSERPLTTTERATLMDEPYRKSKLTYAQARKLLGLEDTAFFKGLRYGKDNAEASTLMEMKAYHAISRALEKEGLKDKKSPLNLSPELQDEIGTAFSLFKTDEDITGRLKDRVQPEILEALLKHISFDKFVQISLKALRRIVPLMEQGKRYDEACAEIYGDHYGKKNAEEKIYLPPIPADEIRNPVVLRALSQARKVINAVVRRYGSPARIHIETAREVGKSFKDRKEIEKRQEENRKDREKAAAKFREYFPNFVGEPKSKDILKLRLYEQQHGKCLYSGKEINLGRLNEKGYIEIDHALPFSRTWDDSFNNKVLVLGSENQNKGNQTPYEYFNGKDNSREWQEFKARVETSRFPRSKKQRILLQKFDEDGIYRIGVKTALSFPKYQIDELGKEIRPCRLKKRPPVR

SEQ ID NO: 147 - protein, 1269 aa, Mycoplasma gallisepticum
MNNSIKSKPEVTIGLDLGVGSVGWAIVDNETNIIHHLGSRLFSQAKTAEDRRSFRGVRRLIRRRKYKLKRFVNLIWKYNSYFGFKNKEDILNNYQEQQKLHNTVLNLKSEALNAKIDPKALSWILHDYLKNRGHFYEDNRDFNVYPTKELAKYFDKYGYYKGIIDSKEDNDNKLEEELTKYKFSNKHWLEEVKKVLSNQTGLPEKFKEEYESLFSYVRNYSEGPGSINSVSPYGIYHLDEKEGKVVQKYNNIWDKTIGKCNIFPDEYRAPKNSPIAMIFNEINELSTIRSYSIYLTGWFINQEFKKAYLNKLLDLLIKTNGEKPIDARQFKKLREETIAESIGKETLKDVENEEKLEKEDHKWKLKGLKLNTNGKIQYNDLSSLAKFVHKLKQHLKLDFLLEDQYATLDKINFLQSLFVYLGKHLRYSNRVDSANLKEFSDSNKLFERILQKQKDGLFKLFEQTDKDDEKILAQTHSLSTKAMLLAITRMTNLDNDEDNQKNNDKGWNFEAIKNFDQKFIDITKKNNNLSLKQNKRYLDDRFINDAILSPGVKRILREATKVFNAILKQFSEEYDVTKVVIELARELSEEKELENTKNYKKLIKKNGDKISEGLKALGISEDEIKDILKSPTKSYKFLLWLQQDHIDPYSLKEIAFDDIFTKTEKFEIDHIIPYSISFDDSSSNKLLVLAESNQAKSNQTPYEFISSGNAGIKWEDYEAYCRKFKDGDSSLLDSTQRSKKFAKMMKTDTSSKYDIGFLARNLNDTRYATIVFRDALEDYANNHLVEDKPMFKVVCINGSVTSFLRKNFDDSSYAKKDRDKNIHHAVDASIISIFSNETKTLFNQLTQFADYKLFKNTDGSWKKIDPKTGVVTEVTDENWKQIRVRNQVSEIAKVIEKYIQDSNIERKARYSRKIENKTNISLFNDTVYSAKKVGYEDQIKRKNLKTLDIHESAKENKNSKVKRQFVYRKLVNVSLLNNDKLADLFAEKEDILMYRANPWVINLAEQIFNEYTENKKIKSQNVFEKYMLDLTKEFPEKFSEFLVKSMLRNKTAIIYDDKKNIVHRIKRLKMLSSELKENKLSNVIIRSKNQSGTKLSYQDTINSLALMIMRSIDPTAKKQYIRVPLNTLNLHLGDHDFDLHNMDAYLKKPKFVKYLKANEIGDEYKPWRVLTSGTLLIHKKDKKLMYISSFQNLNDVIEIKNLIETEYKENDDSDSKKKKKANRFLMTLSTILNDYILLDAKDNFDILGLSKNRIDEILNSKLGLDKIVK

SEQ ID NO: 148 - protein, 1354 aa, Prevotella melaninogenica
MADFAKYQPGMVADGRKIPLDWTLYYLRKKALTQAIRKEELAWILLNFNQKRGYYQLRGEEEEENSTKHEEYYELKVVSVEAAEEGKGGNTWYNVTLENGWIYRRQSKIELNDWVGKVRPFIVTTEYEIDGVTIKKDKNGEVKRSFRAPSENDWGLRKKRTESLLEESGKTVGAFIYNHILSEPADKIRGNFIRTIERKFYKKELEAILREQSKHQKELKDIDTLIACIKELYPNNKPHQDSLIKKDMTYLLITDLIFYQRPLKSKKSLIADCPYEYYEYVIKETGENKRQSIKCIAKSNPYYQEFRLWQFIINLRLFDRNNDKEVTSEYLSSMEDYTRLFTYLNDRKDINQETLLKDFFKQKKVKRGMEKEFPIRWNYIEDKEKKYPCNETRHELLTALGKVGIDHSWLDDKELFYRLWHLLYSVESKEEAEGALRKLVDNDDFVNAFLKIKPFKKEYGAYSEKAIKKLLAVMRMGNLWNEVDICEQTRDRIQNIIKGDIDEKIKDRMGRTFSQLSDFQGLPEWLACYVVYGQHSEATDIQRWTKPENLMAYINGFKQHSLRNPIVEQCILETLRTVHDIWKEAGHIDEIHIELGRGMKSTADQRARMSKSIMQNENTNLRIKSLLMELKNAKEFENVRPYSPMQQEILRIYEEGALQELTKEDAQYNEISKISQMAQPSANELLKYRLWLEQKYCSPYTGKPISLSKLFTSAYQIEHIIPQSRYFDDSFTNKVICEAEVNQLKSNMLGYEFIKKHGGEIVRCTMIGDVKLLDAKEYYNFVTEHYTNNRRKKEKLLMEDIPQEFLNRQMNDSRYISKKVMAILSNIVREEDEQEAKSKFVIACSGGITDRLKQDWGLNDVWNSIVYPRFERLNKLTNTENFGRWENKKGKQVFQTSVPLELQKDFSKKRIDHRHHAMDALVIACASNNIINYLNNESAKSQEKREDLRKKLCDKNRIIRKPWETFTQDAHTALENVVVSFKNYIRVINKATNYYEKYDKNGKKEIAEQKGQDMWAIRKPMHKETVFGQVNLRRKITIKLKDALEKIPAICDKELRDYINILVAKQFNKKQILAHFKSINYRLNMKSVDKVDVWQFSNEKEPMVATRKSVDTSFDTKRIATITDTGIQKILLNYLKAKNNDPNIAFTPEGIAEMNKHITEYNNGKQHQPILKVRVSEPKGAKYQVGETGNKRSKFVEAQKGTNLYFAIYEDKEGNRSYNTIPLNEVIERLKQGLSPVPDANEKSIPLKFHLSPNDLVYVPKTDEENEIKMGQIYKFVDSSGTTANFVPHRVSNLIYNVDKKIAENFCNHEIIQNEYGIGSPQSKNQKSITGEMIKAVCWKLEVDRLGNIHKIIK

SEQ ID NO: 149 - protein, 1130 aa, Streptococcus gallolyticus
MTNGKILGLDIGIASVGVGIIEAKTGKVVHANSRLFSAANAENNAERRGFRGSRRLNRRKKHRVKRVRDLFEKYEIVTDFRNLNLNPYELRVKGLTEQLTNEELFAALRTISKRRGISYLDDAEDDSTGSTDYAKSIDENRRLLKTKTPGQIQLERLEKYGQLRGNFTVYDENGEAHRLINVFSTSDYEKEARKILETQADYNKKITAEFIDDYVEILTQKRKYYHGPGNEKSRTDYGRFRTDGTTLENIFGILIGKCSFYPDEYRASKASYTAQEYNFLNDLNNLKVPTETGKLSTEQKEALVEFAKSTATLGPAKLLKEIAKILDCKVDEIKGYREDDKGKPDLHTFEPYRKLKFNLDSVNIDDLSREVLDKLADILTLNTEREGIEDAIRHNLPNQFTEGQISEIIKVRKSQSTAFNKGWHSFSAKLMNELIPELYATSDEQMTILTRLEKFKVNKKSSKNTKTIDEKEVTDEIYNPVVAKSVRQTIKIINAAVKKYGDFDKIVIEMPRDKNADDEKKFIDKRNKENKKEKDDALKRAAYLYNGTDKLPDEVFHGNKQLETKIRLWYQQGERCLYSGKPIPIQELVHNSNNFEIDHILPLSLSFDDSLANKVLVYAWTNQEKGQKTPYQVIDSMDAAWSFREMKDYVLKQKGLGKKKRDYLLTTENIDKIEVKKKFIERNLVDTRYASRVVLNSLQSALRELGKDTKISVIRGQFTSQLRRKWKIDKSRETYHHHAVDALIIAASSQLKLWEKQDNPMFVDYGNNQVVDKQTGEILSVSDDEYKELVFQPPYQGFVNMISSKGFEDEILFSYQVDSKYNRKVSDATIYSTRKAKIGKDKKEETYVLGKIKDIYSQNGFDTFIKKYNKDKTQFLMYQKDPLTWENVIEVILRDYPTTKKSEDGKNDVKCNPFEEYRRENGLVCKYSKKGKGTPIKSLKYYDKKLGNCIDITPEGSKNEVVLQSLNPWRADVYFNPETLKYELLGLKYSDLSFEKGTGKYHISQEKYDVIKEKEGIGKKSEFKFTLYRNDLILIKDTASGEQEIYRFLSRTMPNVKHYAELKPYDKEKFDNVQELVEALGEADKVGRCIKGLNKSNLSIYKVRTDVLGNKYFVKKEGDKPKLDFKNNKK

SEQ ID NO: 150 - protein, 1371 aa, Streptococcus gallolyticus
MTEKNYSIGLDIGTNSVGWAVITDDYKVPAKKMKVLGNTDKKYIKKNLLGALLFDNGETAEATRLKRTARRRYTRRKNRLRYLQEIFAEEMAKVDESFFYRLDESFLTTDDKDFERHPIFGNKADEIKYHQEFPTIYHLRKHLADSHEKADLRLIYLALAHMIKFRGHFLIEGELNAENTDVQKLFEAFVEVYDRTFDDSNLSEITVDASSILTEKFSKSRRLENLIKHYPTEKKNTLFGNLVALALGLQPNFKTSFKLSEDAKLQFSKDTYEEDLEELIGKIGDEYADLFTSAKNLYDAILLSGILTVADNTTKAPLSASMIKRYNEHQVDLKKLKEFIKNNASDKYDEIFNDKDKNGYAGYIENGVKQDEFYKYLKTTLSKIDGSDYFLDKIEREDFLRKQRTFDNGSIPHQIHLQEMHAILRRQGEHYAFLKENQAKIEKILTFRIPYYVGPLARKNSRFAWAEYHSDEKITPWNFDEIIDKEKSAEKFITRMTLNDLYLPEEKVLPKHSLVYETYTVYNELTKVKYVNEQGKSNFFDANMKQEIFEHVFKENRKVTKDKFLNYLNKEFPEYRIQDLIGLDKENKSFNASLGTYHDLKKILDKSFLDDKTNETIIEDIIQTLTLFEDRDMIRQRLQKYSDIFTPQQLKKLERRHYTGWGRLSYKLINGIRNKENGKSILDYLIDDGYANRNFMQLISDDTLPFKQIIKDAQIIGDIDDVTSVVRELPGSPAIKKGILQSVKIVDELVKVMGHNPDNIVIEMARENQTTNRGRNQSQQRLKKLQDSLKELGSNILNEEKPSYIEGKVENNHLQDDRLFLYYIQNGKDMYTGDELDIDHLSDYDIDHIIPQAFIKDDSIDNRVLTSSAKNRGKSDDVPSLDIVHDRKADWIRLYKSGLISKRKFDNLTKAERGGLTENDKAGFIKRQLVETRQITKHVAQILDSRFNTERDENDKVIRNVKVITLKSNLVSQFRKDFKFYKVREINDYHHAHDAYLNAVVGTALLKKYPKLAPEFVYGEYKKYDIRKFITSSGDKATAKYFFYSNLMNFFKRVIRYSNGKVVVRPVIECSKDTGEIAWNKQTDFEKVRRVLSYPQVNIVKKVETQTGGFSKESILPKGNSDKLIPRKTKKFRWDTPKYGGFDSPNIAYSVFVIADVEKGKAKKLKTVKELVGISIMERSSFEENPVVFLEKKGYQNVQEDNLIKLPKYSLFEFEGGRRRLLASASELQKGNEVVLSRHLVELLYHAHRVNSFNNSEHLKYVSEHKKEFGEVLSCVENFAKSYVDVEKNLGKIRAVADKIDTFSIEDISISFVNLLTLTALGAPADFNFLGEKIPRKRYTSTKECLNATLIHQSITGLYETRIDLSKLGEE

SEQ ID NO: 151 - protein, 1168 aa, Azospirillum sp.
MARPAFRAPRREHVNGWTPDPHRISKPFFILVSWHLLSRVVIDSSSGCFPGTSRDHTDKFAEWECAVQPYRLSFDLGTNSIGWGLLNLDRQGKPREIRALGSRIFSDGRDPQDKASLAVARRLARQMRRRRDRYLTRRTRLMGALVRFGLMPADPAARKRLEVAVDPYLARERATRERLEPFEIGRALFHLNQRRGYKPVRTATKPDEEAGKVKEAVERLEAAIAAAGAPTLGAWFAWRKTRGETLRARLAGKGKEAAYPFYPARRMLEAEFDTLWAEQARHHPDLLTAEAREILRHRIFHQRPLKPPPVGRCTLYPDDGRAPRALPSAQRLRLFQELASLRVIHLDLSERPLTPAERDRIVAFVQGRPPKAGRKPGKVQKSVPFEKLRGLLELPPGTGFSLESDKRPELLGDETGARIAPAFGPGWTALPLEEQDALVELLLTEAEPERAIAALTARWALDEATAAKLAGATLPDFHGRYGRRAVAELLPVLERETRGDPDGRVRPIRLDEAVKLLRGGKDHSDFSREGALLDALPYYGAVLERHVAFGTGNPADPEEKRVGRVANPTVHIALNQLRHLVNAILARHGRPEEIVIELARDLKRSAEDRRREDKRQADNQKRNEERKRLILSLGERPTPRNLLKLRLWEEQGPVENRRCPYSGETISMRMLLSEQVDIDHILPFSVSLDDSAANKVVCLREANRIKRNRSPWEAFGHDSERWAGILARAEALPKNKRWRFAPDALEKLEGEGGLRARHLNDTRHLSRLAVEYLRCVCPKVRVSPGRLTALLRRRWGIDAILAEADGPPPEVPAETLDPSPAEKNRADHRHHALDAVVIGCIDRSMVQRVQLAAASAEREAAAREDNIRRVLEGFKEEPWDGFRAELERRARTIVVSHRPEHGIGGALHKETAYGPVDPPEEGFNLVVRKPIDGLSKDEINSVRDPRLRRALIDRLAIRRRDANDPATALAKAAEDLAAQPASRGIRRVRVLKKESNPIRVEHGGNPSGPRSGGPFHKLLLAGEVHHVDVALRADGRRWVGHWVTLFEAHGGRGADGAAAPPRLGDGERFLMRLHKGDCLKLEHKGRVRVMQVVKLEPSSNSVVVVEPHQVKTDRSKHVKISCDQLRARGARRVTVDPLGRVRVHAPGARVGIGGDAGRTAMEPAEDIS

SEQ ID NO: 152 - protein, 1345 aa, Streptococcus mutans
MKKPYSIGLDIGTNSVGWAVVTDDYKVPAKKMKVLGNTDKSHIKKNLLGALLFDSGNTAADRRLKRTARRRYTRRRNRILYLQEIFAEEMSKVDDSFFHRLEDSFLVTEDKRGERHPIFGNLEEEVKYHENFPTIYHLRQYLADNPEKVDLRLVYLALAHIIKFRGHFLIEGKFDTRNNDVQRLFQEFLAVYDNTFENSSLQEQNVQVEEILTDKISKSAKKDRVLKLFPNEKSNGRFAEFLKLIVGNQADFKKHFELEEKAPLQFSKDTYEEELEVLLAQIGDNYAELFLSAKKLYDSILLSGILTVTDVSTKAPLSASMIQRYNEHQMDLAQLKQFIRQKLSDKYNEVFSDVSKDGYAGYIDGKTNQEAFYKYLKGLLNKIEGSGYFLDKIEREDFLRKQRTFDNGSIPHQIHLQEMRAIIRRQAEFYPFLADNQDRIEKILTFRIPYYVGPLARGKSDFAWLSRKSADKITPWNFDEIVDKESSAEAFINRMTNYDLYLPNQKVLPKHSLLYEKFTVYNELTKVKYKTEQGKTAFFDANMKQEIFDGVFKVYRKVTKDKLMDFLEKEFDEFRIVDLTGLDKENKAFNASYGTYHDLRKILDKDFLDNSKNEKILEDIVLTLTLFEDREMIRKRLENYSDLLTKEQVKKLERRHYTGWGRLSAELIHGIRNKESRKTILDYLIDDGNSNRNFMQLINDDALSFKEEIAKAQVIGETDNLNQVVSDIAGSPAIKKGILQSLKIVDELVKIMGHQPENIVVEMARENQFTNQGRRNSQQRLKGLTDSIKEFGSQILKEHPVKHSQLQNDRLFLYYLQNGRDMYTGEELDIDYLSQYDIDHIIPQAFIKDNSIDNRVLTSSKENRGKSDDVPSKNVVRKMKSYWSKLLSAKLITQRKFDNLTKAERGGLTDDDKAGFIKRQLVETRQITKHVARILDERFHTETDENNKKIRQVKIVTLKSNLVSNFRKEFELYKVREINDYHHAHDAYLNAVIGKALLGVYPQLEPEFVYGDYPHFHGHKENKATAKKFFYSNIMNFFKKDDVRTDKNGEIIWKKDEHISNIKKVLSYPQVNIVKKVEEQTGGFSKESILPKGNSDKLIPRKTKKFYWDTKKYGGFDSPIVAYSILVIADIEKGKSKKLKTVKALVGVTIMEKMTFERDPVAFLERKGYRNVQEENIIKLPKYSLFKLENGRKRLLASARELQKGNEIVLPNHLGTLLYHAKNIHKVDEPKHLDYVDKHKDEFKELLDVVSNFSKKYTLAEGNLEKIKELYAQNNGEDLKELASSFINLLTFTAIGAPATFKFFDKNIDRKRYTSTTEILNATLIHQSITGLYETRIDLSKLGGD

SEQ ID NO: 153 - protein, 1024 aa, Helicobacter mustelae
MIRTLGIDIGIASIGWAVIEGEYTDKGLENKEIVASGVRVFTKAENPKNKESLALPRTLARSARRRNARKKGRIQQVKHYLSKALGLDLECFVQGEKLATLFQTSKDFLSPWELRERALYRVLDKEELARVILHIAKRRGYDDITYGVEDNDSGKIKKAIAENSKRIKEEQCKTIGEMMYKLYFQKSLNVRNKKESYNRCVGRSELREELKTIFQIQQELKSPWVNEELIYKLLGNPDAQSKQEREGLIFYQRPLKGFGDKIGKCSHIKKGENSPYRACKHAPSAEEFVALTKSINFLKNLTNRHGLCFSQEDMCVYLGKILQEAQKNEKGLTYSKLKLLLDLPSDFEFLGLDYSGKNPEKAVFLSLPSTFKLNKITQDRKTQDKIANILGANKDWEAILKELESLQLSKEQIQTIKDAKLNFSKHINLSLEALYHLLPLMREGKRYDEGVEILQERGIFSKPQPKNRQLLPPLSELAKEESYFDIPNPVLRRALSEFRKVVNALLEKYGGFHYFHIELTRDVCKAKSARMQLEKINKKNKSENDAASQLLEVLGLPNTYNNRLKCKLWKQQEEYCLYSGEKITIDHLKDQRALQIDHAFPLSRSLDDSQSNKVLCLTSSNQEKSNKTPYEWLGSDEKKWDMYVGRVYSSNFSPSKKRKLTQKNFKERNEEDFLARNLVDTGYIGRVTKEYIKHSLSFLPLPDGKKEHIRIISGSMTSTMRSFWGVQEKNRDHHLHHAQDAIIIACIEPSMIQKYTTYLKDKETHRLKSHQKAQILREGDHKLSLRWPMSNFKDKIQESIQNIIPSHHVSHKVTGELHQETVRTKEFYYQAFGGEEGVKKALKFGKIREINQGIVDNGAMVRVDIFKSKDKGKFYAVPIYTYDFAIGKLPNKAIVQGKKNGIIKDWLEMDENYEFCFSLFKNDCIKIQTKEMQEAVLAIYKSTNSAKATIELEHLSKYALKNEDEEKMFTDTDKEKNKTMTRESCGIQGLKVFQKVKLSVLGEVLEHKPRNRQNIALKTTPKHV

SEQ ID NO: 154 - protein, 765 aa, Butyrivibrio fibrisolvens
MGITIGLDLGVASVGWAVVNDDYEILESCSNIFPSADASKNSERRGFRQGRRLTRRRKNRIHDFQKLWEDKGFVIPSQGTEDVLAIKIKGLSEKLSVDEVYWVLLNSLKHRGISYLDDADSGDNSSDYAKSISRNEEELKEKLPCEIQWERLQKYGAYRGNISIVEDGEPITLRNVFTTSAYKKEVEQFIDTQAKYNAQYSGDFKADYLEIFNRKREYYEGPGNELSRTDYGKYTTEINADGEYITVDNIFDKLVGKCSVNPDERRAAGASYTAQEFNVLNDLNNLTISSESSFIEDGKLTEDAKRKIIETIKNAKTVNVKKIICDVIGDKKCQISGARIDKNEKEIFHSFEAYNKMRRALEEIGFDISSLSRENLDLIGDILTLNTDRESILNAFNRKGIELADEAKDILVKVRKTNGSLFNKWQSFGLSIMNELIPELYAQPKNQMELLTAMGVFKSRGDRFLECKEIPGDLIVDDIYNPVVSKTVRITVRILNALIKKYGYPDRVVIEMPRDKNSDEEQQRLKKEQRDNENEIKDIKARVKTEYGREITEEDFRQHSKLSLKLKLWNEQQGICPYSGKSIKIDDLLDNPNLFEVDHIIPLSISFDDSRNNKVLVYSSENQDKGNRTPLAYLASVNRQWDIHSFMDYVLKTYAGAQKRKKRDNLLNEQDITKVEVLQGFVNRNINDTRYASKVVLNSLQEYFSSKECSTKVKVIRGSFTHQMRVNLKLKKTVMNHMFIMQLMQCLLLFHRWDMTLIMNLQISI

SEQ ID NO: 155 - protein, 1338 aa, Coprococcus catus
MKQEYFLGLDMGTGSLGWAVTDSTYQVMRKHGKALWGTRLFESASTAEERRMFRTARRRLDRRNWRIQVLQEIFSEEISKVDPGFFLRMKESKYYPEDKRDAEGNCPELPYALFVDDNYTDKNYHKDYPTIYHLRKMLMETTEIPDIRLVYLVLHHMMKHRGHFLLSGDISQIKEFKSTFEQLIQNIQDEELEWHISLDDAAIQFVEHVLKDRNLTRSTKKSRLIKQLNAKSACEKAILNLLSGGTVKLSDIFNNKELDESERPKVSFADSGYDDYIGIVEAELAEQYYIIASAKAVYDWSVLVEILGNSVSISEAKIKVYQKHQADLKTLKKIVRQYMTKEDYKRVFVDTEEKLNNYSAYIGMTKKNGKKVDLKSKQCTQADFYDFLKKNVIKVIDHKEITQEIESEIEKENFLPKQVTKDNGVIPYQVHDYELKKILDNLGTRMPFIKENAEKIQQLFEFRIPYYVGPLNRVDDGKDGKFTWSVRKSDARIYPWNFTEVIDVEASAEKFIRRMTNKCTYLVGEDVLPKDSLVYSKFMVLNELNNLRLNGEKISVELKQRIYEELFCKYRKVTRKKLERYLVIEGIAKKGVEITGIDGDFKASLTAYHDFKERLTDVQLSQRAKEAIVLNVVLFGDDKKLLKQRLSKMYPNLTTGQLKGICSLSYQGWGRLSKTFLEEITVPAPGTGEVWNIMTALWQTNDNLMQLLSRNYGFTNEVEEFNTLKKETDLSYKTVDELYVSPAVKRQIWQTLKVVKEIQKVMGNAPKRVFVEMAREKQEGKRSDSRKKQLVELYRACKNEERDWITELNAQSDQQLRSDKLFLYYIQKGRCMYSGETIQLDELWDNTKYDIDHIYPQSKTMDDSLNNRVLVKKNYNAIKSDTYPLSLDIQKKMMSFWKMLQQQGFITKEKYVRLVRSDELSADELAGFIERQIVETRQSTKAVATILKEALPDTEIVYVKAGNVSNFRQTYELLKVREMNDLHHAKDAYLNIVVGNAYFVKFTKNAAWFIRNNPGRSYNLKRMFEFDIERSGEIAWKAGNKGSIVTVKKVMQKNNILVTRKAYEVKGGLFDQQIMKKGKGQVPIKGNDERLADIEKYGGYNKAAGTYFMLVKSLDKKGKEIRTIEFVPLYLKNQIEINHESAIQYLAQERGLNSPEILLSKIKIDTLFKVDGFKMWLSGRTGNQLIFKGANQLILSHQEAAILKGVVKYVNRKNENKDAKLSERDGMTEEKLLQLYDTFLDKLSNTVYSIRLSAQIKTLTEKRAKFIGLSNEDQCIVLNEILHMFQCQSGSANLKLIGGPGSAGILVMNNNITACKQISVINQSPTGIYEKEIDLIKL

SEQ ID NO: 156 - protein, 1035 aa, Candidatus Puniceispirillum
MRRLGLDLGTNSIGWCLLDLGDDGEPVSIFRTGARIFSDGRDPKSLGSLKATRREARLTRRRRDRFIQRQKNLINALVKYGLMPADEIQRQALAYKDPYPIRKKALDEAIDPYEMGRAIFHINQRRGFKSNRKSADNEAGVVKQSIADLEMKLGEAGARTIGEFLADRQATNDTVRARRLSGTNALYEFYPDRYMLEQEFDTLWAKQAAFNPSLYIEAARERLKEIVFFQRKLKPQEVGRCIFLSDEDRISKALPSFQRFRIYQELSNLAWIDHDGVAHRITASLALRDHLFDELEHKKKLTFKAMRAILRKQGVVDYPVGFNLESDNRDHLIGNLTSCIMRDAKKMIGSAWDRLDEEEQDSFILMLQDDQKGDDEVRSILTQQYGLSDDVAEDCLDVRLPDGHGSLSKKAIDRILPVLRDQGLIYYDAVKEAGLGEANLYDPYAALSDKLDYYGKALAGHVMGASGKFEDSDEKRYGTISNPTVHIALNQVRAVVNELIRLHGKPDEVVIEIGRDLPMGADGKRELERFQKEGRAKNERARDELKKLGHIDSRESRQKFQLWEQLAKEPVDRCCPFTGKMMSISDLFSDKVEIEHLLPFSLTLDDSMANKTVCFRQANRDKGNRAPFDAFGNSPAGYDWQEILGRSQNLPYAKRWRFLPDAMKRFEADGGFLERQLNDTRYISRYTTEYISTIIPKNKIWVVTGRLTSLLRGFWGLNSILRGHNTDDGTPAKKSRDDHRHHAIDAIVVGMTSRGLLQKVSKAARRSEDLDLTRLFEGRIDPWDGFRDEVKKHIDAIIVSHRPRKKSQGALHNDTAYGIVEHAENGASTVVHRVPITSLGKQSDIEKVRDPLIKSALLNETAGLSGKSFENAVQKWCADNSIKSLRIVETVSIIPITDKEGVAYKGYKGDGNAYMDIYQDPTSSKWKGEIVSRFDANQKGFIPSWQSQFPTARLIMRLRINDLLKLQDGEIEEIYRVQRLSGSKILMAPHTEANVDARDRDKNDTFKLTSKSPGKLQSASARKVHISPTGLIREG

SEQ ID NO: 157 - protein, 1270 aa, Mycoplasma gallisepticum
MNNSIKSKPEVTIGLDLGVGSVGWAIVDNETNIIHHLGSRLFSQAKTAEDRRSFRGVRRLIRRRKYKLKRFVNLIWKYNSYFGFKNKEDILNNYQEQQKLHNTVLNLKLEALNAKIDPKALSWILHDYLKNRGHFYEDNRDFNVYPTEELANYFDEFGYYKGIIDSKNDDDDKLEEGLTKYKFSNQHWLEEVKKVLSNQTGLPEKFKEEYESLFSYVRNYSEGPGSINSVSPYGIYHLDEKEGKVVQKYNNIWDKTIGKCSIFPDEYRAPKNSPIAMIFNEINELSTIRSYSIYLTGWFINQEFKKAYLNKLLDLLIKTNSEKPIDARQFKKLREETIAESIGKETLKDVESEEKLEKDDHKWKLKGLKLNTNGKIQYNDLSSLAKFVHKLKQHLKLDFLLEDQYTPLDKINFLQSLYVYLGKHLRYSNRVDSANLKEFSDSSRLFERVLQEQKDGLFKLFEQTDKDDEKILTQTHSLSTKAMLLAITRMTNLDNDEDNQKNNDKGWNFEAIKNFDQKFIDITKTNNNLSLKQDKRYLDDQFINDAILSPGVKRILREATKVFNAILKQFSEEYDVTKVVIELARELSEEKELENTKNYKKLIKKNGDKISEGLKALGIAEDKIEEILKSPTKSYKVLLWLQQDHIDPYSQKEIAFDDILTKTEKTEIDHIIPYSISFDDSSSNKLLVLAESNQAKSNQTPYEFINSGKAEITWEVYEAYCHKFKNGDSSLLDSTQRSKKFAKMMKTDTSSKYDIGFLARNLNDTRYATIVFRDALKDYANNHLVEDKPMFKVVCINGGVTSFLRKNFDPKSWYAKKDRDKNIHHAVDASIISIFSNETKTLFNQLTKFADYKLFKNTDGSWKKIDPKTGVVSEVTDENWKQIRVRNQVSEIAKVIDKYIQDSNIERKARYSRKIENKTNISLFNDTVYSAKKVGYEDQIKRKNLKTLDIHESAEENKNSKVKKQFVYRKLVNVSLLNNDKLADLFAEKEDILMYRANPWVINLAEQIFNEYTENKKIKSQNVFEKYMLDLTKEFPEKFSEAFVKSMIRNKTAIIYNVEKDVVHRIKRLKILSSELKENKWSNVIIRSKNESGTKLSYQDTINSIALMIMRSIDPTAKKQYIRVPLNTLNLHLGDQDFDLHNIDAYLKKPKFVKYLKANEIGDEYKPWRVLTSGTLLIHKKDKKLMYISSFQNLNDLIEIKNLIETEYKENVDSDPKKKKKASQILRSLSVILNDYILLDAKYNFDILGLSKNKIDEILNSKLDLDKIAK

SEQ ID NO: 158 - protein, 1204 aa, Prevotella ruminicola
MERILGIDTGTNSLGWAIVDKDENQYHLVAKGTNIFSEGVKIEKGIESSKAAERTEHRSVRKHYWRRKIRKIRLLTILSDNDLCPRLKHEQLRQWRLKKVYPTDDTFMEWQRTEDKAQVNPYKFRYICLTQKLDLSDITQRFILGRALYHLNQRRGFLSNRKEATKESEGTVKEGISSLSKDMKDSGCEYLGEYFYQLYQQGKKIRNHYTARKEHYLKEFKAICSKQELDDALIEKLEKAIFDQRPLKSQKGQVGTCTFEKGKSRCPSSHPLYEDFRMYSFINNIKVQVDTLYDKGERSLTDEEKQLIIPLFKRKSKRTFPFEDIAKKIAGKNNYCYIKSNEEKAYKFNYQMDTQVSGSPVNAQLEEIFGEDWLSSVCEVYTLANNKSRFQIMNDVWHVLFFYDDEDKLKEFAKDRLQLDDELAEKFSKISIPNDYAALSLKAIRKIMPYLRDYGLIYSEAVFLANLVDVLPQHVWGIKEMREAAIENVIDVMHSYDKNNIDGITLEGCVKTFLKERYQVSDDNLKKLYHPSMLDPYPRQRPNDEGVFQLGSPRISSVKNPMAMHSLFRLRKVVNLMLKKGYITPDTKVHIEFSRDLNDANKRWAIQTWQRENEKERERCRKEIEKYIASPSDTDILKYQLWEEQNHKCLYTGDEIRITDFLGDNPKYDIEHTIPRSAGGDSTKMNLTLCSSRFNRDEKKTKLPAELVNHDEILERISNWKEKYEDIDKQIRKISTKGATSKEDKDSKIRRRHYLILQRDYWRGKYQRFTMTEVPEGFSRRQGTDISVISRYARMYLKSVFKQVYIVKGIATSDFRKMWGIQDEYAKKERVNHVHHCIDAITIACIGKAEYDKLADYRHQYDDYLFQGKTKPTFDKPWPSFVIDIKHIQDELLIAHYAKDNLEKFTKKNLRGKDGRIIRDKFGNKLQMKGDTSRNSLHNDKFYGAINHEGEIKYVYRTNIEALDAKSIGNIVDPTVRSIIESAIAIHGSLKAAINKGIWMNEEKHIPIKKVRVFRNDVKKPIELKDQRDLSDKDYKQHYYVTNDGNYMMLIFSKLNNKGREIRQHVVINSLEATEVIKSHKRSQVGKVVWESYYSKEGFDLIYKLKSGTMILLYENNRDEVWDLDIRNLQKRLYIITKMKYDGRIYMMHHQEAREKKDLEEKSGSFKINEDYRPLIVNSYNQFNALVQDLDFEINDLGEIRRLI

SEQ ID NO: 159 - protein, 1178 aa, Scardovia inopinata
MGKRHNSNMAKKKISYRIGIDVGLNSTGLAAIEVDDDGAPIRILNTMSVIHDGGVDPDAAKVRGTRLAISGIARRTRRMRRRRAKRLDRLEQILEKYGYTDTEPVLEEPYGPWICRAELADGFINDDEQRRMMIGIAIRHIARHRGWRNPYQNVRALLNIDDSDLSEEYKNLKEKVQDQINDGKDLPNFTPSQLVRDYLDNFSGQPAARIRTGKAGPRGNRRDAVGILPQRMRQSDYAYELQRIFDMQKIGRDEAQELLMAVFEAKSPKGSAEKRIGKDPLTGKKRALKASLAFQKYRIVATITNLRIKTGTGSERMLSPTELNDIYTYLLRVQDDNHLPTWEDICEEVLHIGRYQLAGIGKTFEGGERISNMPPVIQTSLAIHGLSEGTLAEKLTKWWDKADDDSRESMIKLLSNTVDIDRVNEVDENFASALDFIDSLDDEELTKLDKIALPRGRAAYSEEALNKLTADMLNTGDDLFSARQRIYHVNNSWRPPQPPIGEPLGNPAVDRVLKITNRYLMNCLNRWGQPRRVTIEHTRSGFTSVKQATEHQKISDKRAEYRRDIVKQLEEAGVESVHEYDIRRWEAVQRQNGQCLYCGRDITFKTCEMDHIVPRKGPGSTNTRTNFAAVCPECNRMKSNIPFASWAETKEAKDRGVSLDKAIKQVRFFNFTKNEYSPQAQRNFKKSMIERLKQKTSDEPLDNRSIESVSWMADELYKRIDWYFNHEQYETSKKAINDDKDNLSGTQVVVYPGSITAEARNAAGLGGNIHFIGGRYKTRLDRRHHAVDACVIAMMEPGIARILTERNQLRQAQRLTARIEDDEVNWKDYPTENTAGYNKYQAWSDRMHALLEYMNNALDYDKIPVVRWERLQLGNRSAHEDTIHPLKKLPLSHEISAIDINHASTPALYEALVSLPDFSEQDGLPADPSRQINVNGERYSGDDLVSFFNSNAAQIAIQGGSAELGTAFHHARIYRCWTVGKNGKKKIFFGMIRVYQHDLLHAKNEDLFTYPLKRSSVSMRYAKKEVVHAILSGNAEYVGYLCVGDELVLDLKGDKSNDEGGSRLSGQVGEFVQKFEEDSKVNSQIVNRWTVDGFPDEAKLRLRPSMFAGEGLKNMKSELVENAAIKNILSKTGWRVSVDVISKKSPVVLRRNAFGEPRWKTNAGLPVSYRWQDTETKE

SEQ ID NO: 160 - protein, 1371 aa, Gordonibacter pamelaeae
MNLRNVESYQVGLDIGTGSVGWAVLDDNGDLCRFKGKPTWGSRVFPTAETAAEARVHRGQRRRYDRRRQRIDLLQRFFADEVAKVDPEFFIRLNQARLHPENRDPAHADYRWPLFNGSNFTEKDYYRQFPTIYHLRAHLLKSDEPADIRLVYLALHNIVKHRGNFLHQDNPSLSARNANVGDAVEALCLALDEWCGAHDVECACDEAALAEALGDASLRPGEKRERAEAALGVEKAHKKLAKAVSSAVVGYAAEFGHVFFAESEGSKFALSNDEKVEAYVCPDEGRDLFDAMRAVHSSYVLMGILSEAQGELLSVCKVGEYERYKRDLETLKSLVRAYGPERYDEFFCGPFYEGTRDYDPGKAQGYTKYNLGASKLSHEDFLKEVQKLLKDIGAQADERYADIERAIEAGAFLRRLKTSDNGTIPYQLHLEEMDAIIERQAAFYPFLAQEKDKLKSLVSFRIPYYVGPLTQKNAARDGKGEARFAWSSRKPGMEDARVYPWNWEDVIDKDQSAEDFIRRMTGTCTYLKGEPVLARCSLDYELFCVLNELAGARWTQDGDKSYRFDAADRLGIVEDLFKKRKRVTYEAAEKWLARTHGPESGKSAGGAYHVSGGQGEDAFESQLSSHYDFCKILGVDELSDADEAMAEDIILWNTVFEDRSILKRKIKLAYGDRLGDAQVRKLCQKRYTGWGRLSGELLRGLRSATDNGPKTIMDILLEGDPNHARRMGAAMNLMEILHDDLLEFQAKIDEHNRERALAVGGMSVDEVTGSPALRRGINQALRVVDEIAGIAGKPPAHIYVEVTRDEGARNKGRRTTSRYRALEAALSSIKAQCADVYAELKERDPRALDDERLTLYFMQCGKCMYSGDALDINKLQTYQVDHILPQSYVKDDSFENKVLVRPDTNQRKGDTLLLDERLIARMRGFWRTLRDAELIGEKKFNNLTRTSVSDEQMKKFVSRQLVETGQMVKQVQQLLQARYPESEVQPVKAGVSHQLRVGCALAKSREINDFHHAHDAYLACQVGRFVQYRHSAVYSEPVKMAAVVKQFIKKQAEDYRRTRELPGSDGFIVSSFMTPGFDVKTGEVFRDAWDAGAEIDRIRRCFDYKDCFISRMPEETHGAFWDATIYSPRAAGKTLSLPLKRGLDPRKYGSYSREQFAYFFVYEAVKPKKKQRVLEFAPVPVRVASALANDPDALEDYARELAEAEGLVFERIRRRKVYKYQQIIVGDSRLYVTGREEVRNARQLAFSQDETKLICRIEQGEECEEGELLDLFRSMQRKYLACAPRLARLMKVAEMEEGFIAATASGKREVLLSLTSIAAAHRNSIDLKPIGRKGSSGQMKITFSKELSTNGILFVDSSVTGMFERRCRLGL

SEQ ID NO: 161 - protein, 1388 aa, Zunongwangia profunda
MKRILGLDLGTNSIGWALVNEAENEKEISKIIKLGVRVNPLTIDEKTNFEKGRPLSTNADRTLKRGARRNLQRYKLRRENLIEILIDNHIITKETPLTEIGKGTTYQTLSLRAKAVRERIDLEDFAKVLLAINKKRGYKSSRKASNDEEGQAIDGMAIAKELYERGITPGQYVLELLENDRKYIPDFYRSDLKQEFNKIWNNQKTFYPEILTDELFKELDGKNKSQTWAICQKPFNIKGIKRITKGREKTIENYHWRVKGLSGKLNLEKLAIILQEINNDINQSSGYLGGISDKSKKLYLNKETVGEFLYKQIAKNPHTSLKNQVFYRHDYLDEFEQIWKTQSNFNANLTDELKQEIRDVIIFYQRKIKSQKSLISFCQFESWEQEYFDKETGKTKTRTVGRRVIPKSSPLFQEFKIWQNLNHLVFTNSETDEKIEIKEVEQEIRKELFEELNLRGDLNPNDLLKILRSQFKIGKLSNWKCNFEKIEGNRTNAALFNIYQKISDFEGYGIDWNKSNAKKIRKELKATFPEIGIDASILEFDAYKKQLTNQSSYELWHLLYSAEEDFKISEQDKLIYGNSSVSLKKKLHLKFGFNPEYAKMLANLSLMSDYGNLSAKAIKKILPYLEDGHLYSEACRLAGYNHSKSLTAEELEKFEPKAKLDLLKKNSLRNPVVEKILNQMVNVVNQVIDTYGKPDGVRIELARELKKSAKERAEMTKGIADGTRRNEEIKKIITQKFGIPNPTKSDLVRYRLWQELESRGYKDIFTDKYISPDKIFSSEIDIEHIIPKALLFDDSFSNKTLSFRNVNLKKANRTALDFITQDYQSNVEAYKERVETWNKDNHISKGKRNKLLMSLKDIPDGFIERDLRNSQYIARKAKRMLYEVFPNEVLATSGSITDKLRSDWDLINVMKELNLPKYKALGLTEYEERLDKGTEELFKHEVIKDWTKRNDHRHHAMDALAVAFTTHNHIQYINNLNARKDITQDNHPIIKNIENLITEVNSKGKRVFKAPMSSFRESAKEQIEAILVSFKNKNKVVTKNINQTKKEGGFNYQNAKTPRGQLHKETIYGKSKQPLEKPVKINNRFCKKQVGLIINFKEQEAVLHHLKKYDNNEKIAFSNKTLKSDPIQVNGSPLREVKIFEEIFTIRKDINPDNFKTQKHLDKIIDKGIKEVMKKRLEEYNGDFKTAFSDLDKNPIWLNQSKGITIKRATISGVTNAEPLHQAKDHLGNIILDDNGKEIPIDYVSTGNNHHVAIYQDESGNLQEEVVSFYEAVIRKNQDQPIIKKRHPKGWKFLFTMKQNEMFVFSSENFNPSEIDLLDEKNAAIISPNLFRVQKIATKNYMFRHHLETEVTNNLDFTYRHFQATEWLRNLCKVRIDHIGRIVQIGEY

SEQ ID NO: 162 - protein, 1082 aa, Methylosinus trichosporium
MRVLGLDAGIASLGWALIEIEESNRGELSQGTIIGAGTWMFDAPEEKTQAGAKLKSEQRRTFRGQRRVVRRRRQRMNEVRRILHSHGLLPSSDRDALKQPGLDPWRIRAEALDRLLGPVELAVALGHIARHRGFKSNSKGAKTNDPADDTSKMKRAVNETREKLARFGSAAKMLVEDESFVLRQTPTKNGASEIVRRFRNREGDYSRSLLRDDLAAEMRALFTAQARFQSAIATADLQTAFTKAAFFQRPLQDSEKLVGPCPFEVDEKRAPKRGYSFELFRFLSRLNHVTLRDGKQERTLTRDELALAAADFGAAAKVSFTALRKKLKLPETTVFVGVKADEESKLDVVARSGKAAEGTARLRSVIVDALGELAWGALLCSPEKLDKIAEVISFRSDIGRISEGLAQAGCNAPLVDALTAAASDGRFDPFTGAGHISSKAARNILSGLRQGMTYDKACCAADYDHTASRERGAFDVGGHGREALKRILQEERISRELVGSPTARKALIESIKQVKAIVERYGVPDRIHVELARDVGKSIEEREEITRGIEKRNRQKDKLRGLFEKEVGRPPQDGARGKEELLRFELWSEQMGRCLYTDDYISPSQLVATDDAVQVDHILPWSRFADDSYANKTLCMAKANQDKKGRTPYEWFKAEKTDTEWDAFIVRVEALADMKGFKKRNYKLRNAEEAAAKFRNRNLNDTRWACRLLAEALKQLYPKGEKDKDGKERRRVFSRPGALTDRLRRAWGLQWMKKSTKGDRIPDDRHHALDAIVIAATTESLLQRATREVQEIEDKGLHYDLVKNVTPPWPGFREQAVEAVEKVFVARAERRRARGKAHDATIRHIAVREGEQRVYERRKVAELKLADLDRVKDAERNARLIEKLRNWIEAGSPKDDPPLSPKGDPIFKVRLVTKSKVNIALDTGNPKRPGTVDRGEMARVDVFRKASKKGKYEYYLVPIYPHDIATMKTPPIRAVQAYKPEDEWPEMDSSYEFCWSLVPMTYLQVISSKGEIFEGYYRGMNRSVGAIQLSAHSNSSDVVQGIGARTLTEFKKFNVDRFGRKHEVERELRTWRGETWRGKAYI

SEQ ID NO: 163 - protein, 1186 aa, Gardnerella vaginalis
MEGNISYAIGIDVGLNSVGLAAIRLDNNGEPIRILKAMSVIHDAGIDPNGAKESDTRKAISGVARRVRRLYRQRRRRLQKLDFLLHSLGFPVVENKDLDFSDSFTPWIFRAKLADEYIADEKQRKQMLSVAIRHIARHRGWRNPYQSIKSMTQETEYSEFYNELLKNIEKFAPGVSCEGSTPAQLVRDYLLSQQGKASRRLRITTDDRRKNHPNSLDPVLPRKLMQSDNMLEILNIFNVQHIDNKYVREQIINAVFYAKSPRGSAENRVGKDAITGKGKRALKASLAFQKYRIISTISNLRIRENSKERCLTIEEKQSVYKLLTTSTDEYSKEKSAEAPLYTWIDVADCLGIERYKLRGVGSQIEDGESVGNRPPMLNSELAILYANAKSLKQSLITWWLAANRTQEDKEAFIEILSNTVDIEAIHDNPEYQDKYGSVIAFIDSMDETEIAALENISLPNGRAAYSLETLDKLNKQMLETDDDLFEARKKLFNLPNNWRPSEAPIAEPTGNPSVDRVLKIVHRFLISAKNRWGNPERINIEHVRSGFQSKKMANSYKKLLDKRTEGKENLKAMMRNSLHLGTSDSISDADIRRYEAVQRQNGQCLYCGSEITYHTCELDHIVPRKGPGSTNTRENLVATCSSCNAQKCNTPFATWCEESTYCKNHDISVDSAINRVRAFIFPPNSYDKRGASQFKKEVIARLKQKVGDEAFDNRSIESVAWMANELHRRIDWYYNSQNYQTNNGISDITNKAQTNVGVYAGSLTAIARRMSGIDGKLEFFDGRRKTRFDRRHHAVDASVIAMMTPGIAQILAIKCNLRETQLLQGNKVVPGGIDWKEYPTANDQGYQQYANWSVRMNALLELLNEEMRADRIAVVNSIRLRYSNSSVHKDDVHALLKLHVGDEIDSETIRRASTPALYCALTRNPDYDVNNGLPENTDRTILLHDKKLNADDSITFFKSKAAQLFVREGSVEIGNSIHHLRIYEYFEKLKSGKVKKSYGMIRVFQDDLHRYIHEDLFSCDLPEQSISMRYADTKVAHAVQTGNANYLGYLVPGDEIIVDFSHVKLSGYIGEFVEFLNKIGANCAAYKHWVVAGTDDKTTLILKPSMISSEGIDKLYSNCERNNFDYASYEKSIDKILVDKGWRVSVNVLDQYKAATIRRNALGEPRWASRSHLPISWSWDTGENRE

SEQ ID NO: 164 - protein, 1434 aa, Bacteroidetes oral
MKNILGLDLGTNSIGWAYVKQAQNDSEKSEIAELGVRVNPLTVDEKTNFEKGKPISTNADRTLKRGARRNLQRYKLRRQELIELLKDYQVISDKTILAEDGKETTFETLRLRVKSAKEQVSLEELARILLMINKKRGYKSSRKAKNEDEGQLIDGMEIARRLYDENLTTGQLSLQLLKEGKKSLPDYYRSDLQHELDKVWNFQKQFHPDILTDEFYTSIQGKGQKATRESFSSKYGIDTAENKGSREEKKLQAYQWRADATHKELTKEELAFVITEINNNINNSSGYLGAISDRSKELIFANETVGEYLWKQIQNDPHTSLKNQVFYRQDYFDEFERIWETQSGFYPQILTESLKNELRDILIFYQRKLKSQKALVSICEFESKEIPLKDKQGNPISKNGIPVTKLVGPKVAPKSSPLFQEFKIWQNLNNVLVRPKGSRKRKVTTNQQSTLLEGQEPVFELNLEQKELLFEELNLKGNLKTDYCLELIGYSAKEWEMNYPTLEGNKTNKALYEAYLKIIDSEGYDAKKLLKVKTDKDDINLDDIKVSASEIKTMISDIFNELGINTKILDFDAELERKQFEAQASYRLWHLLYSYEGDDSKSGNELLYRLLEDKFGFKREHSKTLANVSLLSDYGNLSTKAIRTIYPYIKENKFSTACELAGYRHSKLSISKEENENRTLKDTLDVLKKNSLRQPVVEKILNQMINLINELIEKHSEKDEKGNIVKYFKFDEIHIELARELKKNAEERRELDSKVREGKDRNEKIITILKSEFGLPYPTKNDITRYRLYEELKDNGYKDLYTNTYIPREKLFSKEIDIEHIIPKSRLFNDSFSNKTICYRQDNLNKGERTAYDYIEGLGKTQLDEYLNRVENLYTNKFITKAKYRNLLKKESEIGDGFIERDLRETQYIAKKAKEMLLQITRHVVSTTGSITDRLRDDWELVNVMRELNLPKYKVLGLTEIQERKNGQTVEVITDWTKRNDHRHHAMDALTVAFTKHSHIQYLNFLNARKDEKHKEYSNIMGIQQLETEKTTDKDGKDRRVFKTPIPNFRQVAKEHLESILISHKTKNKVVTRATNKIAGSKKQQETLSPRGQLHKETVYGKYRRYVQKEEKIGSKFDLQTIERVANPLYKRLLTKRLEENGGDPKKAFTGKNALAKSPIYLDETQTQQLPEKVKLVWLETDFSIRKDITPDNFKDEKSIDKVLDEGIKRILKDRLKSFDGDAKRAFTDLEQNPIWLNKEKGIAIKRVTISGVSNAEPLHTKKDHLGNEIFDDTGKPIPVDYVSTGNNHHIAIYRDENGNLQEKAVSFFEAVTRANQGLPTVDKTYNQHLGWQFLFTMKQNEMFVFPNKETGFDPQEIDLLDPKNKKLISPNLFRVQKISTKNYFFRHHLETSVETHNALNGVTYKSQLGLNGITDIIKVRINHLGDIVHIGEY

SEQ ID NO: 165 - protein, 1341 aa, Peptoniphilus sp.
MWGSRLFEEASTAQDRREHRSNRRRLERRKYRLDLLEELFVEEINKIDPEFFIRLRESKFHFEDRSLKNTFILFNDKMEGGYNDKVFFSKYPTIYHLRSALINGNKEDVRAVFLAIHNILKNRGHFLLAGNDINISLSLNDTLTDLFEYLKIHLGIEVEFENKLKDIEKIALDKNLSKSDKQKKIVQLLETDYKKQLADVFKLSLGLTANMENIFGKENEQGLEFINAENKIKKIQFDSSYEENIAEFDQFYGEYFEIIDICKKIYDAISLSQILVDGKGLSESKVLSYEKHKEDLKLLKKVLKNIDKAYDNKGEDRLVYKVLKEDKDKGTNYVNYSKLSNNGTATTKEEFYKFLSKNLDLKKFGKLNKEDIETLDYINSEILLGRFLPLQKEKINGVIPYQLQMKELTQILNNASKYLPFLNKIEDGMTVKDKIISLIKFRIPYYVGPLNEYNRIENGNGFAWIEKKKNEKIFPWNFNDVVDIEKSAEKFINNLTNKCTYIKEETVLPKNSIIYSKFMVLNELNNLQYGNKKLDIELKMKMYTDLFLEKKDNRKVTEKRILEYFRINGINDGKEKLTGLNNEIHADMKSYRDMCEIMGENFNINVAENIINWITVFHGEKKILINKIKNVYGKMFNDEQISKLSKLNYSDWGRLSKKLLTDIKCYIDADGINFPVSILEAMEVSNKNLMELLSNKYEFISCIDDINNKYFGDRDISASELIDELYVSPAVKRGIWQSVRILEEIVSIIGHNPKKIFIEMTRHNEEKVQKSSRRHNLEELYKAIRKDPEYVELIKEFDSTTDTDSFKIKKLYLYFMQLGKCAYSKEKIDFDKLFTDSYDIDHIYPRSKTKDDSIHNNLVLVKAKYNREKTDVYPIDINIQKNMNSFWNFLYTKKFITEEKYKRLIRTSDLTDEELAKFISRQLVETSQSTKATAEVLKQIYGDSDICYVKAENVSDFRYGSSRQKDKNDIQKLFVKCREVNHFHHAKDAYLNIVVGNVYDVKFTKNPVNFIKKNKMGNKSNYSLNHMFCFDVERNGYKAWDSSETIKTVGRMMKSNDVRITKHVHPTRGELYDATIYKAKIAKTGSYMPLKSSKNTPLSDVTKYGGYTKIKIAYYSVYKYKFSDKNLIKTEIRLIPIPIYLSKNDDDIKEYVKNYLNDRVNSKLIDFTKIYDKLYVNSLIKINGYLYYLGGKTNDRVWIDNAVSIVLDDKIEYLIKRISNDIKYGYEINVSDDELMDIYESLAEKANKKIFYNRLSDFEKIFSNMDVKKKFVKLEKNDKCRVLLQLLNVLTDSQTTYKLEMVGLKHSRSNIGMKISNLEEFKVINSSITGLYSNEIDILNI

SEQ ID NO: 166 - protein, 1391 aa, Lactobacillus gasseri
MTKIKNEYIVGLDVGTNSCGWVAMDFQNTILRMHGKTAIGSHLFDAGNSAADRRAFRTTRRRIKRRKWRLKLLEEIFDPYMTEVDPYFFARLKESGLSPLDKRKNVSSIVFPTALEDKKFYCNYPTIYHLRYDLMSEDKKFDLREIYLAIHHIVKYRGNFLYNTPVKDFEASKIDVKDSLEKLNELYERLDSEFTVELDSSNALEIEKIIRDKKVFKINKVKSIHQLLSLKTENKERTKLIKDVSKQIINAILGYKTKFETILLKNISKDEADDWEFKLTDVDADNKFENLIGDLNENEQEILLEIRNLANAITLSNIVEEGKTLSESMIDKYNKHSDDLELLKQVISDHPDRDKAKKLALAYDLYVNNRHGKLLQAKDVLGSKKTLSKEDFYKEVKKNLDDSKASQEILDTIALDSFMPKQRTNENGVIPYQLHQLELDRIIKNQGKYYPFLKEVNPVSSHLKEAPYKLDELIRFRVPYYVGPLISPNESTKNKQTKKNQNFAWMIRKEQGQITPWNFDQKVDRMASANKFIKRMTTKDTYLLGEDVLPANSLLYQKFTVLNELNNIKINGKRISVPLKEELYNNLFKKNSTVTTNKLKSYLKENYNLINVEIKGLADEKKFNSGLTTYNKLRNLKIFDQQLDDLNYDKDFERIIEWSTIFEDKAIYKDKLKTIKWLSDRQIDKLSKIRMQGWGQLSKKLLSQLTDNNGQTIIEQLWDSQNNFMQIVNQSDFKDAIAVANQNLLVNTSVEDILNEAYTSPANKKAIRQVVKVVDDIVKAASGKVPKQIAIEFTRDADDKAKISQTRANKLRKVYKELSNELASETIRNELERVAKDQKLLKDKYYLYFMQLGRDAYTGEPINIDDLGQYDIDHILPQSFIKDDSLENRVLVKKAVNNGKSDNVPVKLYGNRMAADLGMTIRHMWEKWKDQGLITKTKYNNLIIDPDKINKYESSGFIHRQLVETSQIIKLVSTILQSKYPDTEIIVVKARYNHYLRKHLNLYKSREVNDYHHAIDAYLSAICGNLLYQVYPYLRPFFVYGQYKKFSSDPKKEKIIYDKTRKYNFISQIFENKSNDIISLETKKKVFDKKDIIEKLKHAYNYKYMLVSRETETHDQEMFKMTVYPRLSRDTKKSRNLISKKKDMPTEIYGGYTNNSDAYMVIARINKKKGTEYRVFGVPMRELVNLRKAEKNGRYNAYLKQVLEPEIMYSKNGKKNKTISSFEIVKAKVPYKQVILDGDKKFMLASSTYVQNAKQLTLSQNSMQAITDNCENDTEEEKALEEKALIEAYDEILTNIDKYLPLFDINKFREKLHAGREKFINLSLDVKKDTILQVLNGLHDNAVMPKIKSLGLSTPLGFMQFSSGVPLSENAKLIYQSPTGLFEKRVKISDL

SEQ ID NO: 167 - protein, 1426 aa, Sphingobacterium spiritivorum
MKHILGLDLGTNSIGWALIKQDFENKQGEILGMGSRIIPMSQDILGDFGKGNSVSQTAERTKYRSVRRLRERFLLRRERLHRILNVLGFLPEHYASQIDFTKRFGKFKEETEPKLVYSNEGFIFKKSFEEMLSDFKTHQPQLLEDNKKIPYDWTIYYLRKKALSRKIEKEELAWILLNFNQKRGYYQLRGEEEEENPNKLIEFYSLKIVDVLADEPQKGKSDIWYSLILENGWIYRRSSKTPLFDWKEKTRDFIVTIDLNDDGSVKTDKEGNEKRSFRAPGENDWTLVKKKTEQEIDSSRKTVGTYIYETLLKNPKQKIKGKLVRTIERKFYKTELKQILEKQKEFHPELRQDDLYSDCVRELYKNNEAHQLTLSKKDFVHLFMEDIIFYQRPLGSQKSSISNCTLEFRKYKDENGTEHTQYLKAIPKSNPYYQEFRIWQWMYNLNIYKKEDDTNVTKDFLNTKADFESLFEFLNNRKEVDQKALLKHFKLNDKTHRWNYVEDKKYPCNETKTMILSRLDKVENISDDFLTREMEQKIWHIIYSVNDKVEYEKALKSFAGKNNLEDNSFFEAFKKFPPFKSEYGAFSEKAIKKLLPLMRMGKFWNYNNISEQSKSRIQKIITGEYDENIKDKVREKAIHLTTETDFQGLQLWLVQYIVYGRHSEAAMLGKWNSADDLEEFLKEFKQHSLRNPIVEQVITETLRVVKDIWQKYGNGAKDFFREIHIELGREMKLPAEERERLTRQISENENTNFRIKALLAEMMDDNSVENVRPFSPMQQEILKIYEEGVLNSDIEIEDDILKISKTAQPSSSDLKRYKLWLEQKYKSPYTGQIIPLNKLFTPEYEIEHIIPQSRYFDDSFTNKIICESAVNKLKDNYIGLEFIKKLGGSIVECGNGKSVAILKHDAYEDFIKKHYANNRSKRNKLLLEDIPEKMIERQMNDTRYISKYISGVLSNIVRVEDGTDEGVNSKNIVPGNGKITTQLKQDWGLNDVWNDLILPRFERMNHLTNSTDFTAWNENHQKFLPTVPVEFSKGFSKKRIDHRHHALDALVIACATKDHVNLLNNQSAKSDTKRYDLKKKLMKFEKVAYNHPQTGERIEREAPKQFLKPWETFTIDAKNHLETIIVSFKQNLRVINKATNYYEKYVEKEGTKVKERVEQKGTNWAIRKPMHKETVSGKIDLPRIKVPKGKILTATRKSLDTSFNLKTIGSITDTGIQKILKNYLQYKDNNPELAFSPEGIEDMNKNIEKFNNGKAHQSISKVRVFELGSKFPLGQSGNKKEKYVEAAKGTNLFFAIYQDKNGKRSYETIPLNEVIERQKQGLSVVDLKGVDDFYLSPNDLVYVPSEDELENISMIDFNKMSSERIYKVVSFTGNQIFFVRQDIATSVVNKAEFSTLNKMERAIDGTMIKETCVKLQIDRLGNISKI

SEQ ID NO: 168 - protein, 1361 aa, Lactobacillus casei; identical to SEQ ID NO: 84

SEQ ID NO: 169 - protein, 1436 aa, Bacteroides fragilis
MKRILGLDLGTNSIGWALVNEAENKDERSSIVKLGVRVNPLTVDELTNFEKGKSITTNADRTLKRGMRRNLQRYKLRRETLTEVLKEHKLITEDTILSENGNRTTFETYRLRAKAVTEEISLEEFARVLLMINKKRGYKSSRKAKGVEEGTLIDGMDIARELYNNNLTPGELCLQLLDAGKKFLPDFYRSDLQNELDRIWEKQKEYYPEILTDVLKEELRGKKRDAVWAICAKYFVWKENYTEWNKEKGKTEQQEREHKLEGIYSKRKRDEAKRENLQWRVNGLKEKLSLEQLVIVFQEMNTQINNSSGYLGAISDRSKELYFNKQTVGQYQMEMLDKNPNASLRNMVFYRQDYLDEFNMLWEKQAVYHKELTEELKKEIRDIIIFYQRRLKSQKGLIGFCEFESRQIEVDIDGKKKIKTVGNRVISRSSPLFQEFKIWQILNNIEVTVVGKKRKRRKLKENYSALFEELNDAEQLELNGSRRLCQEEKELLAQELFIRDKMTKSEVLKLLFDNPQELDLNFKTIDGNKTGYALFQAYSKMIEMSGHEPVDFKKPVEKVVEYIKAVFDLLNWNTDILGFNSNEELDNQSYYKLWHLLYSFEGDNTPTGNGRLIQKMTELYGFEKEYATILANVSFQDDYGSLSAKAIHKILPHLKEGNRYDVACVYAGYRHSESSLTREEIANKVLKDRLMLLPKNSLHNPVVEKILNQMVNVINVIIDIYGKPDEIRVELARELKKNAKEREELTKSIAQTTKAHEEYKTLLQTEFGLTNVSRTDILRYKLYKELESCGYKTLYSNTYISREKLFSKEFDIEHIIPQARLFDDSFSNKTLEARSVNIEKGNKTAYDFVKEKFGESGADNSLEHYLNNIEDLFKSGKISKTKYNKLKMAEQDIPDGFIERDLRNTQYIAKKALSMLNEISHRVVATSGSVTDKLREDWQLIDVMKELNWEKYKALGLVEYFEDRDGRQIGRIKDWTKRNDHRHHAMDALTVAFTKDVFIQYFNNKNASLDPNANEHAIKNKYFQNGRAIAPMPLREFRAEAKKHLENTLISIKAKNKVITGNINKTRKKGGVNKNMQQTPRGQLHLETIYGSGKQYLTKEEKVNASFDMRKIGTVSKLAYRDALLKRLYENDNDPKKAFAGKNSLDKQPIWLDKEQMRKVPEKVKIVTLEAIYTIRKEISPDLKVDKVIDVGVRKILIDRLNEYGNDAKKAFSNLDENPIWLNKEKGISIKRVTISGISNAQSLHVKKDKDGKPILDENGRNIPVDFVNTGNNHHVAVYYRPVIDKRGQLVVDEAGNPKYELEEVVVSFFEAVTRANLGQPIIDKDYKTTEGWQFLFSMKQNEYFVFPNEKTGFNPKEIDLLDVENYGLISPNLFRVQKFSLKNYVFRHHLETTIKDTSSILRGITWIDFRSSKGLDTIVKVRVNHIGQIVSVGEY

SEQ ID NO: 170 - protein, 1517 aa, Bacteroides sp.
MKKIVGLDLGTNSIGWALINAYINKEHLYGIEACGSRIIPMDAAILGNFDKGNSISQTADRTSYRGIRRLRERHLLRRERLHRILDLLGFLPKHYSDSLNRYGKFLNDIECKLPWVKDETGSYKFIFQESFKEMLANFTEHHPILIANNKKVPYDWTIYYLRKKALTQKISKEELAWILLNFNQKRGYYQLRGEEEETPNKLVEYYSLKVEKVEDSGERKGKDTWYNVHLENGMIYRRTSNIPLDWEGKTKEFIVTTDLEADGSPKKDKEGNIKRSFRAPKDDDWTLIKKKTEADIDKIKMTVGAYIYDTLLQKPDQKIRGKLVRTIERKYYKNELYQILKTQSEFHEELRDKQLYIACLNELYPNNEPRRNSISTRDFCHLFIEDIIFYQRPLKSKKSLIDNCPYEENRYIDKESGEIKHASIKCIAKSHPLYQEFRLWQFIVNLRIYRKETDVDVTQELLPTEADYVTLFEWLNEKKEIDQKAFFKYPPFGFKKTTSNYRWNYVEDKPYPCNETHAQIIARLGKAHIPKAFLSKEKEETLWHILYSIEDKQEIEKALHSFANKNNLSEEFIEQFKNFPPFKKEYGSYSAKAIKKLLPLMRMGKYWSIENIDNGTRIRINKIIDGEYDENIRERVRQKAINLTDITHFRALPLWLACYLVYDRHSEVKDIVKWKTPKDIDLYLKSFKQHSLRNPIVEQVITETLRTVRDIWQQVGHIDEIHIELGREMKNPADKRARMSQQMIKNENTNLRIKALLTEFLNPEFGIENVRPYSPSQQDLLRIYEEGVLNSILELPEDIGIILGKFNQTDTLKRPTRSEILRYKLWLEQKYRSPYTGEMIPLSKLFTPAYEIEHIIPQSRYFDDSLSNKVICESEINKLKDRSLGYEFIKNHHGEKVELAFDKPVEVLSVEAYEKLVHESYSHNRSKMKKLLMEDIPDQFIERQLNDSRYISKVVKSLLSNIVREENEQEAISKNVIPCTGGITDRLKKDWGINDVWNKIVLPRFIRLNELTESTRFTSINTNNTMIPSMPLELQKGFNKKRIDHRHHAMDAIIIACANRNIVNYLNNVSASKNTKITRRDLQTLLCHKDKTDNNGNYKWVIDKPWETFTQDTLTALQKITVSFKQNLRVINKTTNHYQHYENGKKIVSNQSKGDSWAIRKSMHKETVHGEVNLRMIKTVSFNEALKKPQAIVEMDLKKKILAMLELGYDTKRIKNYFEENKDTWQDINPSKIKVYYFTKETKDRYFAVRKPIDTSFDKKKIKESITDTGIQQIMLRHLETKDNDPTLAFSPDGIDEMNRNILILNKGKKHQPIYKVRVYEKAEKFTVGQKGNKRTKFVEAAKGTNLFFAIYETEEIDKDTKKVIRKRSYSTIPLNVVIERQKQGLSSAPEDENGNLPKYILSPNDLVYVPTQEEINKGEVVMPIDRDRIYKMVDSSGITANFIPASTANLIFALPKATAEIYCNGENCIQNEYGIGSPQSKNQKAITGEMVKEICFPIKVDRLGNIIQVGSCILTN

SEQ ID NO: 171 - protein, 1399 aa, Olsenella uli
MNLRNTTDEYNIGLDMGTNSVGWAVTDKAGAIAHFKGKPTLGSRLFDAAQTAAGARIHRSQRRRYVRRRWRLDLLQSLFQDEVSKVDSEFFCRLRQSRLYVGDREKGHADYTWPIFNDSDFNEVDYYKRFPTIYHLRKWLMETDEKADIRLIYLATHNIVKHRGNFLRENNKSLSSRDANPAQAVKSLRLALNDWCSERDYECAWKGEEDDGAIDEAILNVLADGEKGRSDQAKEIAKLTGVDCGDAKQSKQCNEAIAKAIVGLKVEMKNIFGEFPAEKTSYIYLSSDEDVEAVRESCPDDSGELFQALCKLYSAYILQELLSYADPSGQTISANMVAKYKQYGRDLRLLKELTRTYAPQKYDLFFRGETYAGSSDYVVDEARGYTRYNLGTTKANYDDFQKSVKELFKGTDALQDERYQEMMVAFGEQKFLRRLKTSDNGSIYYQLHLEELHTILENQGKHYPFLLSEEDKIESLVSFRIPYYVGPLTRKNAAIGHDGKERFAWSSRKDGMEHAVITPWNWEEIIDRDKSAEDFIMRMTGDCTYLQGEPVLPKCSLLYEEFCALNEFNGAHWTVDGDDERRFDAAQRERIMCDLFRRTRSVTYNKVSDWLERKYNFTGARVRGGQGEHGFESKLGSYIFFCKDVFKTDGLDEADYTMIEQIILWSTLFEDRDILKRKIEEAYGGDRLTSEQIKVICKKRFTGWGRLSKRLLTDIKVNTDTGRKSIMDVLREGNPNNGQRSRTMVFMEVLRDEDLGFQKAIDGLNRDYFREHNNGLMDVNDLPGSPAIRRSINQAVRIVDEIASIARKEPTNIFIEVTREEDDPRKKGKRTKRRYDAIKSALEKFKKDDPSLWKELCEKAPGDMDERLSLYFMQRGKCMYSGRPIKIEELHTGKYEVDHIIPRSYIKDDSFENKVLVYREENQHKTDALLIDSSIRQKMGGYWRMLHDAKLVGDKKFRNLFRNHIDDKAMKGFVARQIVETSQMVKLVQTLFEARYPNTRIVPVKAGISHDLREAAGLVKCREANDFHHAHDAFLACRIGLFIQKRHPSVYDNPIGLARIMRDYARMQAREYKKSHCLAHTQGFIVNSFLSSGFDEETGEIFKDDWDAKAEVEGIRRVLNCRQCFISRMPVEGDTRYGGRYWGETIYSPKGKHKHEIPLKQGLDPNLYGGYSDLLYSYFLIYEASDVSSGERVLRFIGIPTSIAARMANQKRLEEYVSRLALQENLEHVRMVRKIMKKQLIEVDNCRLLVTAADAVTNATELAFSLDEMKIISTCAKCINGADPSAIDKIGNAQDSFFDNLKRRGSDRCALLFSQLKLDKLSQNFYMISSDDKSKILISILDRIRAKSNSVDLSLVGGAKHAAQMKFDFNAKLNNPASSFVLIDQSVTGMFERRTRIGL

SEQ ID NO: 172 - protein, 1398 aa, Veillonella atypica
METQTSNQLITSHLKDYPKQDYFVGLDIGTNSVGWAVTNTSYELLKFHSHKMWGSRLFEEGESAVTRRGFRSMRRRLERRKLRLKLLEELFADAMAQVDSTFFIRLHESKYHYEDKTTGHSSKHILFIDEDYTDQDYFTEYPTIYHLRKDLMENGTDDIRKLFLAVHHILKYRGNFLYEGATFNSNAFTFEDVLKQALVNITFNCFDTNSAISSISNILMESGKTKSDKAKAIERLVDTYTVFDEVNTPDKPQKEQVKEDKKTLKAFANLVLGLSANLIDLFGSVEDIDDDLKKLQIVGDTYDEKRDELAKVWGDEIHIIDDCKSVYDAIILMSIKEPGLTISQSKVKAFDKHKEDLVILKSLLKLDRNVYNEMFKSDKKGLHNYVHYIKQGRTEETSCSREDFYKYTKKIVEGLADSKDKEYILNEIELQTLLPLQRIKDNGVIPYQLHLEELKVILDKCGPKFPFLHTVSDGFSVTEKLIKMLEFRIPYYVGPLNTHHNIDNGGFSWAVRKQAGRVTPWNFEEKIDREKSAAAFIKNLTNKCTYLFGEDVLPKSSLLYSEFMLLNELNNVRIDGKALAQGVKQHLIDSIFKQDHKKMTKNRIELFLKDNNYITKKHKPEITGLDGEIKNDLTSYRDMVRILGNNFDVSMAEDIITDITIFGESKKMLRQTLRNKFGSQLNDETIKKLSKLRYRDWGRLSKKLLKGIDGCDKAGNGAPKTIIELMRNDSYNLMEILGDKFSFMECIEEENAKLAQGQVVNPHDIIDELALSPAVKRAVWQALRIVDEVAHIKKALPSRIFVEVARTNKSEKKKKDSRQKRLSDLYSAIKKDDVLQSGLQDKEFGALKSGLANYDDAALRSKKLYLYYTQMGRCAYTGNIIDLNQLNTDNYDIDHIYPRSLTKDDSFDNLVLCERTANAKKSDIYPIDNRIQTKQKPFWAFLKHQGLISERKYERLTRIAPLTADDLSGFIARQLVETNQSVKATTTLLRRLYPDIDVVFVKAENVSDFRHNNNFIKVRSLNHHHHAKDAYLNIVVGNVYHEKFTRNFRLFFKKNGANRTYNLAKMFNYDVICTNAQDGKAWDVKTSMNTVKKMMASNDVRVTRRLLEQSGALADATIYKASVAAKAKDGAYIGMKTKYSVFADVTKYGGMTKIKNAYSIIVQYTGKKGEEIKEIVPLPIYLINRNATDIELIDYVKSVIPKAKDISIKYRKLCINQLVKVNGFYYYLGGKTNDKIYIDNAIELVVPHDIATYIKLLDKYDLLRKENKTLKASSITTSIYNINTSTVVSLSNKVGIDVFDYFMSKLRTPLYMKMKGNKVDELSSTGRSKFIKMTLEEQSIYLLEVLNLLTNSKTTFDVKPLGITGSRSTIGVKIHNLDEFKIINESITGLYSNEVTIV

SEQ ID NO: 173 - protein, 795 aa, Prevotella disiens
MEKQRILGLDPGTNSLGWAVLDFDNSKQEYNLVRKGEVIFEEGVGKSKRGEFSKAAYRTFYKSTRKHYFRRRLRKIEVLKVLVKYDFCPYLSDDLLKQWHEKKIYPAVKEFMDWQRTSDAEGKNPYYDRHCCLNEKLDLSLKSDRYVLGRALYHLTQRRGFKSNRLIQNNDENEEGKVKKGISELSTEMQEANCNYLGDYFYKLYTEKGNTVQIRKRYTDREKHYKNEFNAICEKQELNETIVKELDKAIFFQRKLKPQRHGVGKCTFEPNNRRCAISHPDFERFRMLCFINNIKIKTPFEENLRPLNNEEKALIEPLFYRKSIKNFDFEEIAKKLAGKNNYCYIKDDSSKQYKFNYRMSQGASTCQTIAKLKSIFGEEWKNGIAETYTNRRKKEGLKKQAEMVDDIWNVLYSVSECDVLKDFAINKLQLDEKTADNFSKTKLAQGFATLSLKAIRKILPFLEQGFGYTEAVFLANIPTVVGKEYWNNEDIRNDIMEEIKTIFYHNTLKTNDSHNTILFCIKDILSNNFDLAPGAIDKLYHPSMINVYKDVIPNEDGILQLGSPKIDAVKNPMAMRSLHIIRKVVNELLREGIINSDTEVRIEYARELNDANKRHAIADWQKKQYGKHQKYRKEIKELFKAETGFEIEPNETDILKFELWEEQNHICLYTGQEIGISEFVGENPKYDIEHTIPRSLGGDSTKMNMTLCENKFNRENKQKKLPSELANHSEILERIDDWKKKIYILQKKYDSIRTHNGMDKENKDKKIVSMQVRISGSSICVYSQNTLLWLQYGYN

SEQ ID NO: 174 - protein, 1428 aa, Burkholderiales bacterium
MGKTHIIGVGLDLGGTYTGTFITSHPSDEAEHRDHSSAFTVVNSEKLSFSSKSRTAVRHRVRSYKGFDLRRRLLLLVAEYQLLQKKQTLAPEERENLRIALSGYLKRKGYARTEAETDTSVLESLDPSVFSSAPSFTNFFNDSEPLNIQWEAIANSPETTKALNKELSGQKEADFKKYIKTSFPEYSAKEILANYVEGRRAILDASKYIANLQSLGHKHRSKYLSDILQDMKRDSRITRLSEAFGSTDNLWRIIGNISNLQERAVRWYFNDAKFEQGQEQLDAVKLKNVLVRALKYLRSDDKEWSASQKQIIQSLEQSGDVLDVLAGLDPDRTIPPYEDQNNRRPPEDQTLYLNPKALSSEYGEKWKSWANKFAGAYPLLTEDLTEILKNTDRKSRIKIRSDVLPDSDYRLAYILQRAFDRSIALDECSIRRTAEDFENGVVIKNEKLEDVLSGHQLEEFLEFANRYYQETAKAKNGLWFPENALLERADLHPPMKNKILNVIVGQALGVSPAEGTDFIEEIWNSKVKGRSTVHSICNAIENERKTYGPYFSEDYKFVKTALKEGKTEKELSKKFAAVIKVLKMVSEVVPFIGKELRLSDEAQSKFDNPYSLAQLYNLIETERNGFSKVSLAAHLENAWRMTMTDGSAQCCRLPADCVRPFDGFIRKAIDRNSWEVAKRIAEEVKKSVDFTNGTVKIPVAIEANSFNFTASLTDLKYIQLKEQKLKKKLEDIQRNEENQEKRWLSKEERIRADSHGICAYTGRPLDDVGEIDHIIPRSLTLKKSESIYNSEVNLIFVSAQGNQEKKNNIYLLSNLAKNYLAAVFGASDLSQITNEIESTVLQLKAAGRLGYFDLLSEKERACARHALFLNSDSEARRAVIDVLGSRRKASVNGTQAWFVRSIFSKVRQALAAWTQETGNELIFDAISVPAADSSEMRKRFAEYRPEFRKPKVQPVASHSIDAMCIYLAACSDPFKTKRMGSQLAIYEPINFDNLFTGSCQVIQNTPRNFSDKTNIANSPIFKETIYAERFLDIIVSRGEIFIGYPSNMPFEEKPNRISIGGKDPFSILSVLGAYLDKAPSSEKEKLTIYRVVKNKAFELFSKVAGSKFTAEEDKAAKILEALHFVTVKQDVAATVSDLIKSKKELSKDSIENLAKQKGCLKKVEYSSKEFKFKGSLIIPAAVEWGKVLWNVFKENTAEELKDENALRKALEAAWPSSFGTRNLHSKAKRVFSLPVVATQSGAVRIRRKTAFGDFVYQSQDTNNLYSSFPVKNGKLDWSSPIIHPALQNRNLTAYGYRFVDHDRSISMSEFREVYNKDDLMRIELAQGTSSRRYLRVEMPGEKFLAWFGENSISLGSSFKFSVSEVFDNKIYTENAEFTKFLPKPREDNKHNGTIFFELVGPRVIFNYIVGGAASSLKEIFSEAGKERS

SEQ ID NO: 175 - protein, 1025 aa, gamma proteobacterium
MGGYMPQLMRYRLALDIGSTSIGWAMIRLSMQNEPIAIIRMGVRIFSDGRNPKDGSSLAVTRRVARQMRRRRDRLLKRKTRLLNALVQKKFFPEDADARKALVVLNPYELRKEGLYRQLSGPEFGRALFHISQRRGFLSNRKTDKKDNDSSVLKKAIVDLRQQLEVENCQTIGEWLFKQQQSGKSVRARLRGKTQKDKAYDFYIDRAMIAHEFDTLWVSQAKYDPLLFNEDARAILRDILLYQRPLKPVKPGRCTLIPDESRAPLALPLTQQARIYQELNHLRITTPALGAQALTVAQRNTIAALLEKSDVTFVKIAKALGLTSTTEFNLQDIKRDRLKGNATAIILARNQYFGRRWHDFNADLQNLIVDKLVNEGSETALIEWLKANTDVDESAAERVSGVTLPEGYGSLSVAALRRLLPALKEDVVVYSEAVKRAGFDSHSALSLIEQTGELYQELPYYGEVLQRHVGFGSGDPNDSPERRFGKIANPTVHIGLNELRKIINALIKRYGNPAEVVVELARDLKLSREKRKEIQEEQKQRQDRNEKRIKDACEILGIDPLVIDRGKRREISQKMQLWDELNPKDAANRRCPYTGDQISIEKLLSAEVEIEHILPFSKTLDDSLNNKTVAMRRANRDKGNRTPYEAFGESLNPDYDYDAILQRASLMPREKRKRFASDGYQQWLRDDKDFLSRALNDTAYLSRIAKEYLTLICPPNSVRAIPGRMTAQLRAMFGLNRLLSEGGIKNREDHRHHAIDAAVIGVTDQGLLQKFSRASARTRELQLSRLVDDMPLPWDTYREHVTRALEHLVVSHKPDHGYQGKMHEDTAWGLRDNGQVTRRVRSEDGGPRQRLLENKNVVKINSTRDFSRHGIDEQGQVNAYKGYVGGSNYCIEIWIDEKGKWNSDVVSTFQAYQIVRELGEKAAWQKLRNPLLSLSAKPLVMRLIIDDVVKMQIAGQNKIMRVVKIAQNGQIFFAEHNEANVDARDKDKNNPFKYISKTAGSLQKAGGIHMAISPIGDARPVRYGR

SEQ ID NO: 176 - protein, 1364 aa, Pediococcus acidilactici
MGDRKYNLGLDIGTSSIGFAAVDENNQPIRVKGKTAIGVRLFEEGKTAADRRGFRTTRRRLSRRRWRINLLNEIFDAHLAEVDPTFLARLKESNRSNLDPKKSFQGSLLFPERKDYQFYEEYPTIYHLRKALMEKDRKFDFREIYLAVHHIIKYRGNFLNGTPMRSFKVENIELDTLFDQLNQLYAEIVPDNELAFDLAQVADVKDVLSSTTIYKMDKKKQLVKMMLLPASNKALQSENKKIVTQFVNAILNYKFKLDVLLQVETDADWSLKLNDEGADDKLEEFTGDLDENRLEIIDLLQRLHNWFSLNEITKDGNSLSAAMVEKYENHHHHLGLLKKVIENHPDAKKAKALKETYTAYVGKTDDKTQNQDDFYKAVEKNLDDSPDAKEIKRLIQLDQFMPKQRTGQNGAIPHQLHQQELDQIIEKQSKYYPFLAEPNPNVKRRKDAPYKLDELIAFKIPYYVGPLVTPEEQAQNGENVFAWMKRKAAGPITPWNFDEKVDRMESANRFIRRMTTKDTYLFGEDVLPAESMIYQKFVVLNELNNLKINGRHLSLKDKQDVYNDLFKQQKTVSIKALQNYYVTKKKAATAPTVGGLADPKKFLSSLSTYIDFKNMFGERVNDPQFQEDLEQIVEWSTIFEDRGIFKAKLQALGWLSEKQIQQLVAKRYKGWGRLSKKLLTGLKNAEGYSILDEMWRSTGNFMQIQSRPEFAALIQQANEKQFEGNDPDNVWENIENILGDAYTSPQNKKAIRQVVKVVQDIEKAVGNPPEKIAIEFTREAAANPQRTQSRLRTLEKLYESAEEVVDAGLTAELAEFKENKHVLSDKYYLYFTQLGRDVYTGDTISLDKLNDYDVDHILPQSFIKDDSLDNRVLTIRAVNNGKSDNVPAKMFGKKMGSFWRYLLDNGMISKRKYNNLITDPDNISKYAQKGFINRQLVETSQVIKLTANILNGIYDKDTEIIEVPAKMNSQMRKMFDLVKVREVNDYHHAFDAYLTIFIGNYLYKCYPKLQPYFVYDNFKKFGNKEDIGHKRFNFLGKIEREKKVVAPETGEILWSNVAPNETIKQIKKVYDYKFMIVSREITTRRAELFNQTVYPKNYHGKLIPIKEDRPTDLYGGYSGNTDAYLAIVALEDKKKGKYFKVVGIPTRVAAKLEKLKQQDSQQYLQALHKVIAPQFTKSTKKGIKKTEFEIVLDKVHYRQLVQDGPVKMMLGSSTYKYNAKQLVLSEKALQVIADDRKFDETQKDDNLIAVYDEILSIVNQSFDLYDINGFRKKLNDNRDQFIDLPAETKYEGRKVVAHGKREMILEILKGLHANAAFGNLKPIGFSTAFGQLQVPNGIILSKNAILIHQSPSGLFERKIKLSDL

SEQ ID NO: 177 - protein, 1364 aa, Peptoniphilus duerdenii
MKNLKEYYIGLDIGTASVGWAVTDESYNIPKFNGKKMWGVRLFDDAKTAEERRTQRGSRRRLNRRKERINLLQDLFATEISKVDPNFFLRLDNSDLYREDKDEKLKSKYTLFNDKDFKDRDYHKKYPTIHHLIMDLIEDEGKKDIRLLYLACHYLLKNRGHFIFEGQKFDTKNSFDKSINDLKIHLRDEYNIDLEFNNEDLIEIITDTTLNKTNKKKELKNIVGDTKFLKAISAIMIGSSQKLVDLFEDGEFEETTVKSVDFSTTAFDDKYSEYEEALGDTISLLNILKSIYDSSILENLLKDADKSKDGNKYISKAFVKKFNKHGKDLKTLKRIIKKYLPSEYANIFRNKSINDNYVAYTKSNITSNKRTKASKFTKQEDFYKFIKKHLDTIKETKLNSSENEDLKLIDEMLTDIEFKTFIPKLKSSDNGVIPYQLKLMELKKILDNQSKYYDFLNESDEYGTVKDKVESIMEFRIPYYVGPLNPDSKYAWIKRENTKITPWNFKDIVDLDSSREEFIDRLIGRCTYLKEEKVLPKASLIYNEFMVLNELNNLKLNEFLITEEMKKAIFEELFKTKKKVTLKAVSNLLKKEFNLTGDILLSGTDGDFKQGLNSYIDFKNIIGDKVDRDDYRIKIEEIIKLIVLYEDDKTYLKKKIKSAYKNDFTDDEIKKIAALNYKDWGRLSKRFLTGIEGVDKTTGEKGSIIYFMREYNLNLMELMSGHYTFTEEVEKLNPVENRELCYEMVDELYLSPSVKRMLWQSLRVVDEIKRIIGKDPKKIFIEMARAKEAKNSRKESRKNKLLEFYKFGKKAFINEIGEERYNYLLNEINSEEESKFRWDNLYLYYTQLGRCMYSLEPIDLADLKSNNIYDQDHIYPKSKIYDDSLENRVLVKKNLNHEKGNQYPIPEKVLNKNAYGFWKILFDKGLIGQKKYTRLTRRTPFEERELAEFIERQIVETRQATKETANLLKNICQDSEIVYSKAENASRFRQEFDIIKCRTVNDLHHMHDAYLNIVVGNVYNTKFTKNPLNFIKDKDNVRSYNLENMFKYDVVRGSYTAWIADDSEGNVKAATIKKVKRELEGKNYRFTRMSYIGTGGLYDQNLMRKGKGQIPQKENTNKSNIEKYGGYNKASSAYFALIESDGKAGRERTLETIPIMVYNQEKYGNTEAVDKYLKDNLELQDPKILKDKIKINSLIKLDGFLYNIKGKTGDSLSIAGSVQLIVNKEEQKLIKKMDKFLVKKKDNKDIKVTSFDNIKEEELIKLYKTLSDKLNNGIYSNKRNNQAKNISEALDKFKEISIEEKIDVLNQIILLFQSYNNGCNLKSIGLSAKTGVVFIPKKLNYKECKLINQSITGLFENEVDLLNL

SEQ ID NO: 178 - protein, 1089 aa, Corynebacterium matruchotii
MNSANVNYRVGIDVGSYSLGMAAIAIDDDGKPTEILSAISLIHDSGVDPDSAKSAATRLATSGIARRTRRLYRRKRKRLAKLDKFISSQGWPLKEFEKYEDPFYPWRVRAELATTAITDQQELGEKLSIALRHIARHRGWRNPYSKVTALYTVTEPSDAFLAMQEECAKQLGRTIPETITVGQLVTGMNLGKTRLRGENSLLAARPRQSDNANEIHTIAKVQGLSNELVRQIIDHVFAAESPKGSAAEQVGKDPLQPTKKRALKASDAFQQYRIAALIGNLRIRGGKGNRRLTTEETRLVFDYLRSLPAKQEPTWQLVAEQLKIDRGNLVGTAIMTDDGERAGAKPPVHDTNRIMENTKIKPLATWWKSADADARAAMVKALSNAEVDDFDSQAGAQVQEFFFGISDEDQEKLDGLHLPIGRAAYSEDTLDRLTKRMIGEGMDLYEARQAEFKISNDWAPPAPEIGERVGNPAVDRVLKATARWLNAAERQWGAPKSVNIEHVRAAFMSESSARELDRDNQQRAKRNVKVVAEMQEKLGIEGRPSRADVWRFQSIQRQNGKCAYCGAEISFKNSEMDHIIPQAGEGSTNTRDNLVAVCRECNSSKSNIAFAVWAENTSRPGVSVQKAIERTHHWVTDSGLRKPEFDKFRKQVCDRLRRKATDEPIDARSLESVAWMANELRSRIAQKFKDGDTKVRVYKGALTAEARRASGISGKLEFVDGKGKSRLDRRHHAVDAAVVAFTSNYVAETLALRSNMKFDQELRRKAPQWREFTGSDHVHQVEWTKWKYRMQALAELLNNALVQDRIVVMHNLRLRLGNGAAHEDTIGKLTRLKVGDAISTTDIDRASSEALWCALTRDPDYDPKTGLPENPNRTIRIHGTHLTASDEITVFPVAAASIPIRDGFAKLGSNYHHVRLFRVPSGKKYKYCLMQVYTVDLLKFRKEDLFTVELKPQTISVRTCEALLRKALANGTAEYLGWLVSDDELLIDTSSFDTPGIVKLREEYGPVNRWRLAGLTSVTRLNLRPLYLSKEGLKPNVNPEIKKIIDNRSWIITVNKLFSSGHVKIIRRDALGRPRLHSAAHLPICWEVK

SEQ ID NO: 179 - protein, 1134 aa, Streptococcus mitis
MNGLVLGLDIGIASEGVGILEKNSGKIIHANSRLFPAATADNNVERRKNRQARRLNRRKKHRGVRFQDLFEDYGLLTDFSKVSINLNPYRLRVDGLNQQLTNEELFIALKNIVKRRGISYLDDASEDGGAVSSDYGKAVEENRKLLAEQTPGQIQLERFEKYGQVRGDFTVVENGEKLRLINVFSTSAYKKEAERILRKQQEFNNQITDEFIEDYLKILTGKRKYYHGPGNEKSRTDYGRFRTDGTTLDNIFGILIGKCTFYPEEYRASKASYTAQEFNLLNDLNNLTVPTETKKLSEEQKKVIVEYAKEAKTLGASTLLKYIAKMIDASVDQIRGYRVDVNNKPEMHTFEVYRKMQSLETISVGELSRNVLDELAHILTLNTEREGMEEAINTKLKDSFSQDQVLELVQFRKNNSSLFSKGWHNFSLKLMMELIPELYETSEEQMTILTRLGKQKSKETSKRTKYIDEKELTEEIYNPVVAKSVRQAIKIINEATKKHGIFDNIVIEMARENNEEDAKKDYIKRQKANQDEKNAAMEKAAFQYNGKKELPDNIFHGHKELATKIRLWHQQGEKCLYTGKTIPISDLIYNQYKYEIDHILPLSLSFDDSLSNKVLALATANQEKGQRTPFQALDSMDDAWSYREFKSYVKDLKSLSNKKKDYLLTEEDISKIEVKQKFIERNLVDTRYSSRVVLNALQDFYKSHQFDTTISVVRGQFTSQLRRKWGLEKSRETYHHHAVDALIIAASSQLRLWKKQNNPLITYKEGQFVDSQTGEIISLTDDEYKELVFKAPYDHFVDTLSSKTFEDSILFSYQVDSKFNRKISDATIYATRKAKLDKEKKEYTYTLGKIKDIYSLGTKTPSKTGFYKFLDLYNKDKSQFLMFQKDRKTWDEVIEKIMEQYRPFKEYDKTGKLVDFNPFEKYRQENEPIRKYSKKGNGPEIKSLKYYDILLGKHKNITPEGSRNTVALLSLNPWRTDVYYNMETKKYEFLGLKYADLPFEEGGAYGISTETYNELREKEGIGKNSEFKFTLYKNDLILIKDTETNCQQIFRFWSRTGKDNPKSFEKHKIELKPYEKARFEKGEELEVLGKVPPSSNQLQKNMQIENLSIYKVKTDVLGNKHFIKKEGDKPKLKF

SEQ ID NO: 180 - protein, 1373 aa, Streptococcus bovis
MTKKNYSIGLDIGTNSVGWAVITDDYKVPAKKMKVLGNTDKKYIKKNLLGALLFDSGETAEATRLKRTARRRYTRRKNRLRYLQEIFAEEMTKVDESFFQRLDESFLRWDDDNKKLGRYPIFGNKADVVKYHQEFPTIYHLRKHLADSSEKADLRLVYLALAHMIKFRGHFLIEGELNAENTDVQKIFADFVGVYDRTFDDSHLSEITVDAASILTEKISKSRRLENLIKYYPTEKKNTLFGNLIALALGLQPNFKMNFKLSEDAKLQFSKDSYEEDLGELLGKIGDDYADLFTSAKNLYDAILLSGILIVDDNSTKAPLSASMIKRYVEHQEDLEKLKEFIKANKSELYHDIFKDKNKNGYAGYIENGVKQDEFYKYLKNTLSKIAGSDYFLDKIEREDFLRKQRTFDNGSIPHQIHLQEMHAILRRQGDYYPFLKENQDRIEKILTFRIPYYVGPLARKDSRFSWAEYHSDEKITPWNFDKVIDKEKSAEKFITRMTLNDLYLPEEKVLPKHSHVYETYAVYNELTKIKYVNEQGKDSFFDSNMKQEIFDHVFKENRKVTKEKLLNYLNKEFPEYRIKDLIGLDKENKSFNASLGTYHDLKKILDKAFLDDKVNEEVIEDIIKTLTLFEDKDMIHERLQKYSDIFTADQLKKLERRHYTGWGRLSYKLINGIRNKENNKTILDYLIDDGSANRNFMQLINDDTLPFKQIIQKSQVVGDVDDIEAVVHDLPGSPAIKKGILQSVKIVDELVKVMGDNPDNIVIEMARENQTTNRGRSQSQQRLKKLQNSLKELGSNILNEEKPSYIEDKVENSHLQNDQLFLYYIQNGKDMYTGDELDIDHLSDYDIDHIIPQAFIKDDSIDNRVLTSSAKNRGKSDDVPSLDIVRARKAEWVRLYKSGLISKRKFDNLTKAERGGLTEADKAGFIKRQLVETRQITKHVAQILDARFNTESDENDKVIRDVKVITLKSNLVSQFRKDFEFYKVREINDYHHAHDAYLNAVVGTALLKKYPKLASEFVYGEYKKYDIRKFITNSSDKATAKYFFYSNLMNFFKRVIRYSNGKVIVRPVVEYSKDTEDIAWDKKSNFRTICKVLSYPQVNIVKKVETQTGGFSKESILPKGDSDKLIPRKTKKAYWDTKKYGGFDSPTVAYSVFVVADVEKGKAKKLKTVKELVGISIMERSFFEENPVEFLENKGYHNIREDKLIKLPKYSLFEFEGGKRRLLASASELQKGNEMVIPGHLVKLLYHAQRINSFNSTKYLDYVSAHKKEFEKVLSCVEDFANLYVDVEKNLSKIRAVADSMDNFSIEEISNSFINLLTLTALGAPADFNFLGEKIPRKRYTSTKECLNATLIHQSITGLYETRIDLSKIGEE

SEQ ID NO: 181 - protein, 1099 aa, Corynebacterium accolens
MSLLYRVGIDVGTYSLGCTAIEVDDNDQPVSILSSVSLIHDSGLDPDQQKRAVTRLASSGVARRTRRLYRRRRRRMVKLENFLTAQGWETLPFERYSDPYLPWHARVALVNGYISDDTQRGQYLSIAFRHIANHRGWRNPYWKVSSLYSPDKPSDAFEQIRKELEASTGRQIPETATVGQLISFAQFGKDRLRGGGKQKDKKKPQEQVNQAVISARLHQIDHAREINEICRVQKIDDTLRKQILDLVFAAESPKGAQKGRVGKDPLQPKLFRALKASDAFQQYRIAALTGNLRIYRNGVTVPLDRDEKLIVFNYLVNLPKKEEPSWLKIAEILNIDRGQLRGTATMTDDGERAGATPPVHDTNRTILDSKVKPLAHWWENASDDERAAMLKSLSNSEVEDFDSPAGAQVQAFFADLDETEQEKLDSLHLPMGRAAYSEDTLMRLTNRMLDENLDLYEARLAEFGIPKDWAPPAPRIGEPVGNPAVDRVLKGVARWLEAAADEWGAPKSVVIEHVRDGFVSKSKAIEIDRANNNRHKRNRELFQKMQENLGIEGKVRSSDLWRYQSVQRQNCQCAYCGSPITYTTCEMDHIVPRAGEGSTNTRDNLVATCHRCNLAKKNIPFAVWAEKSTIPGVSVKEALDRTRHWSEDSGMSKKDFQKFRKNVCERLNRTVVDEPLDARSMESVAWMANELRGRVAQRFQEENTTVNVYRGALTAEARRAAGITDKLRFIDGTGKSRLDRRHHAVDAAVVAFIHNYVAETLAIRSNKKREAQLLQGTSQWKEFTGSDDKHRAVWNAWIPKMQKLAVLLQIALDEDRIVVTSNLRLRLGNGRAHEDTISELKTIRVGDAISVTDIDRASSEALWCALTREPDFDEKDGLPENPNRRIRVHGTWYDAEDEIEVFPVGAGAIKVRGGYAKLSRFHHARVYKIPGKKAPIYCMLRVYNTDLVQHRHEDLFSVELKPQTMSVRQAEPKLRKALAENTAEYLGWLVTDDELIIDTSTFRTGLIEEMQSEFGLVRRWRLDGFDSPSLLTLRPLHMSAEGLPDDCALGSRKIIDTKGWRVSINKVFNAGNTTVVRRDALGRARLTSNAHLPISWKEE

SEQ ID NO: 182 - protein, 1054 aa, Actinobacillus pleuropneumoniae
MKLTPLNYILGLDLGIASVGWAVVEIDEQENPLGLIDVGVRTFDRAEVAKTGESLALARRLARSSRRLVKRRADRIKKVKRLLKSENILLSADEQLPNDVWQLRVKGLDQKLERQEWAAVLLHLLKHRGYLSQRKNESKSENKELGALRSGVAANHQILQSAEYRTPAEIAVKKFHVEEGHIRNQRGAYTHTFSRLDLLAEIELLFTRQTELGNPHTSAKLLENLTALLMWQKPALAGEAILKMLGKCTFEPTEYKAAKNSYSAERFVWLTKLNNLRILEQGAERALTDNERFALLDQPYEKAKFTYAQARTMLALPDEAIFKGVRYQGEDKKAVETKTILMEMKAYHQIRKALENADLKAEWNELKNNSELLDDIGTAFSLHKTDEDICRYLDGKLSESILNALLENLNFDKFIQLSLKALQQILPLMLQGQRYDEAVSAIYGDHYGKKSAEINRLLPTIPADEIRNPVVLRTLTQARKVINAVVRLYGSPARIHIETGREVGKSYQDRKKLEKQQEDNRKHRESAVQKFKEYFPNFVGEPKGKDILKMRLYELQQAKCLYSGKSLELHRLLEKGYVEVDHALPFSRTWDDSFNNKVLVLANENQNKGNLTPYEWLDGKNNSEPWQNFVARVQTSGFSHTKKQRILSHKLDEKGFIERNLNDTRYVVRFLCNFIADNMLLTGKGKRKVFASNGQITALLRGRWGLQKVRDDNDRHHALDAVVVACSTVAMQQKITRFVRYEEGNVFSGERIDRETGEIIPLHFPSPWAFFRENVEIRIFSENPKLELENRLPDYPQYNHEFVQPLFVSRMPTRKMTGQGHMETVKSAKRLDEGLSVLKVPLTQLKLNDLERMVNREREMALYESLKVRLEQFDNDPAKAFAEPFYKKGGALVKAVRVEQTQKSGVLVRDGNGVADNASMVRVDVFTKAGKYFLVPIYTWQVAKGILPNKAVTANVDEIDWLEMDESYQFIFTMYPNDLVKVKLKKEEFFGYYGGLDRATGAIVIKEHDLEKSKGRQGIYRIGVKLALSFEKYQVDELGKNIRPCRPTKRQHVR

SEQ ID NO: 183 - protein, 1369 aa, Lactobacillus iners
MNNNYYLGLDLGTNSVGWAVTDDHYNIIKFHGKHMWGMRLFEEAETAKDRRLHRQARRRRQRLVERINLLEELFDKEISKVDQGFFARKKESDLHFEDKTTKSEYALFNDKSYTDRDYYKQYPTIFHLIMDLIENDKKRDIRLVYLACHYLIKHRGHFIFDGKNFTVDNSFENLLDKLITYLKDNDDITLSFPKDQLINIFKNSNLNSTEKSDQLKPFFGRTNLEKGIIKLLSGGKQDLSNMFRDETLKNSNYKNLKFSDNRFDDERDGYAADLGDRIDLLILLKQIYDASILESMMSQARVSIDGHKYISSAKVCAYEKHKSDLKRLKSLIKKYLPSEYNNIFRKITEKDNYVAYSKSNITNNKREKALKYVKYVDFTKYLTKKLKTIKTQDAEDDQEIFEIKGELEKQSFLPKQRTLDNSIIPYQLHLMELKKILDNQSKYYDFLLAKDDQEGITVKDKIISLLTFRLPYYIGPVNPAVHGKFAWVKRLANGKVTPWNYKEKIDIDASHEEFIKTKLSKCSFLIGCDVLPKNSLLYQKYMVLSELNTIKFNGVNISEKLKDDIYQNLFKNIQKVTKKRLQNYIKEHENIIGDVIVTGIDNAFKQGLVSYLKFKKIIGDKVDDDRYQKVLEKIIRDITLYDECAGKKIKKEYKDSDLFTEDELNKIVKLTFNDWGRLSAELLDQLEGEDTVSGETGKIIEFMQKHNYNLMQLMSKKFTFKSKIDEINKSYYQHDKFNYKSMIDSLYVSPATKRILWQSLKVVHEISKIMKHDPEKIFIEMARSKEDHPKRKLSRKADLKQVYKDSKKQIISIIGKDKYQDLSNELDNKDDRDLRWDNLYLYYTQLGRSMYSLKPIDISELMNKNLYDQDHIFPKSKKYDDSIENRVLVEKELNVKKSDIYPISDANIIPQKIKGQVESFWKMLYDHKLIGDKKYARLIRSKAFTDDELAGFIARQLVETRQATKETADLLKRLCPKSRIVYAKAQNASIFRQKFDIPKSRTINDLHHAQDAYLNIVVGNIFDTKFTQDPRNFIKNTKDSRNYNLEKIYDYNVERNNYVAWIAPDGETNGTIANVKCNLSTKDFRVTRPSFYKKGALFNQNLSRKGSNLAPIKEHSPKSNPLKYGGYSGKNNSFFVVVAGKDNKGKDIVKLIPVNTLIYNKMLHCDYKAKQELLTSYVANNFAINNFRIVKDDIKMYSLVKIDGAYYYLVGGTDERIEVKNAMQLLLSKDSIKAVKILEKESKDQFANIKNYKDIDIKLGRTFNEVVSKYTNSVFGKSMLISDKYRKDIFKSVEKSILEFNHLDTIGKADNLLKFVTLMRPSGSAHSLKMVGLIERIRKSNVISNFNEFKLINQSVTGLFENEEDLLKL

SEQ ID NO: 184 - protein, 1420 aa, Bifidobacterium bifidum
MSRKNYVDDYAISLDIGNASVGWSAFTPNYRLVRAKGHELIGVRLFDPADTAESRRMARTTRRRYSRRRWRLRLLDALFDQALSEIDPSFLARRKYSWVHPDDENNADCWYGSVLFDSNEQDKRFYEKYPTIYHLRKALMEDDSQHDIREIYLAIHHMVKYRGNFLVEGTLESSNAFKEDELLKLLGRITRYEMSEGEQNSDIEQDDENKLVAPANGQLADALCATRGSRSMRVDNALEALSAVNDLSREQRAIVKAIFAGLEGNKLDLAKIFVSKEFSSENKKILGIYFNKSDYEEKCVQIVDSGLLDDEEREFLDRMQGQYNAIALKQLLGRSTSVSDSKCASYDAHRANWNLIKLQLRTKENEKDINENYGILVGWKIDSGQRKSVRGESAYENMRKKANVFFKKMIETSDLSETDKNRLIHDIEEDKLFPIQRDSDNGVIPHQLHQNELKQIIKKQGKYYPFLLDAFEKDGKQINKIEGLLTFRVPYFVGPLVVPEDLQKSDNSENHWMVRKKKGEITPWNFDEMVDKDASGRKFIERLVGTDSYLLGEPTLPKNSLLYQEYEVLNELNNVRLSVRTGNHWNDKRRMRLGREEKTLLCQRLFMKGQTVTKRTAENLLRKEYGRTYELSGLSDESKFTSSLSTYGKMCRIFGEKYVNEHRDLMEKIVELQTVFEDKETLLHQLRQLEGISEADCALLVNTHYTGWGRLSRKLLTTKAGECKISDDFAPRKHSIIEIMRAEDRNLMEIITDKQLGFSDWIEQENLGAENGSSLMEVVDDLRVSPKVKRGIIQSIRLIDDISKAVGKRPSRIFLELADDIQPSGRTISRKSRLQDLYRNANLGKEFKGIADELNACSDKDLQDDRLFLYYTQLGKDMYTGEELDLDRLSSAYDIDHIIPQAVTQNDSIDNRVLVARAENARKTDSFTYMPQIADRMRNFWQILLDNGLISRVKFERLTRQNEFSEREKERFVQRSLVETRQIMKNVATLMRQRYGNSAAVIGLNAELTKEMHRYLGFSHKNRDINDYHHAQDALCVGIAGQFAANRGFFADGEVSDGAQNSYNQYLRDYLRGYREKLSAEDRKQGRAFGFIVGSMRSQDEQKRVNPRTGEVVWSEEDKDYLRKVMNYRKMLVTQKVGDDFGALYDETRYAATDPKGIKGIPFDGAKQDTSLYGGFSSAKPAYAVLIESKGKTRLVNVTMQEYSLLGDRPSDDELRKVLAKKKSEYAKANILLRHVPKMQLIRYGGGLMVIKSAGELNNAQQLWLPYEEYCYFDDLSQGKGSLEKDDLKKLLDSILGSVQCLYPWHRFTEEELADLHVAFDKLPEDEKKNVITGIVSALHADAKTANLSIVGMTGSWRRMNNKSGYTFSDEDEFIFQSPSGLFEKRVTVGELKRKAKKEVNSKYRTNEKRLPTLSGASQP

SEQ ID NO: 185 - protein, 1092 aa, Ilyobacter polytropus
MKYSIGLDIGIASVGWSVINKDKERIEDMGVRIFQKAENPKDGSSLASSRREKRGSRRRNRRKKHRLDRIKNILCESGLVKKNEIEKIYKNAYLKSPWELRAKSLEAKISNKEIAQILLHIAKRRGFKSFRKTDRNADDTGKLLSGIQENKKIMEEKGYLTIGDMVAKDPKFNTHVRNKAGSYLFSFSRKLLEDEVRKIQAKQKELGNTHFTDDVLEKYIEVFNSQRNFDEGPSKPSPYYSEIGQIAKMIGNCTFESSEKRTAKNTWSGERFVFLQKLNNFRIVGLSGKRPLTEEERDIVEKEVYLKKEVRYEKLRKILYLKEEERFGDLNYSKDEKQDKKTEKTKFISLIGNYTIKKLNLSEKLKSEIEEDKSKLDKIIEILTFNKSDKTIESNLKKLELSREDIEILLSEEFSGTLNLSLKAIKKILPYLEKGLSYNEACEKADYDYKNNGIKFKRGELLPVVDKDLIANPVVLRAISQTRKVVNAIIRKYGTPHTIHVEVARDLAKSYDDRQTIIKENKKRELENEKTKKFISEEFGIKNVKGKLLLKYRLYQEQEGRCAYSRKELSLSEVILDESMTDIDHIIPYSRSMDDSYSNKVLVLSGENRKKSNLLPKEYFDRQGRDWDTFVLNVKAMKIHPRKKSNLLKEKFTREDNKDWKSRALNDTRYISRFVANYLENALEYRDDSPKKRVFMIPGQLTAQLRARWRLNKVRENGDLHHALDAAVVAVTDQKAINNISNISRYKELKNCKDVIPSIEYHADEETGEVYFEEVKDTRFPMPWSGFDLELQKRLESENPREEFYNLLSDKRYLGWFNYEEGFIEKLRPVFVSRMPNRGVKGQAHQETIRSSKKISNQIAVSKKPLNSIKLKDLEKMQGRDTDRKLYEALKNRLEEYDDKPEKAFAEPFYKPTNSGKRGPLVRGIKVEEKQNVGVYVNGGQASNGSMVRIDVFRKNGKFYTVPIYVHQTLLKELPNRAINGKPYKDWDLIDGSFEFLYSFYPNDLIEIEFGKSKSIKNDNKLTKTEIPEVNLSEVLGYYRGMDTSTGAATIDTQDGKIQMRIGIKTVKNIKKYQVDVLGNVYKVKREKRQTF

SEQ ID NO: 186 - protein, 994 aa, Streptococcus downei
MENQRGKRQRITHQEPYSIGLDIGTASVGSAVINNDLTVPQKRFKVRDINGNVIKTIKKNMSSVLIFDEANPAKGARTKRTSRRRYTRRNFRLLELKKLFEKEIEKIDPNFFHRIKEDSFFNWNDKEFDKHPLFGNLKEEKKFHNNYPTVFHLRNEIGKNSSKKFDLRLVYLALAHIIKYRGHFLDETFDPDASVSVEKRLNDFIVEYNELFDKDLRSEAKFSEILMSDSSNSVKIESTLSLYPSEKNTIFQVFLKLIVGNQGDFNKFFKDELESSSHSGKLVFSSDEVEDEKEELISIIGEDYLDIINLCQSLYSTVALAKIISTDTGESNTPLSASMVKRYNEHKGDLANLKGIVKHFIPEKYEEVFGEHSKTGYTAYIRNPNKMPEKKFYDYLYHEGEKGKISGILSDSRIYELPAVQKFILKIEQKSFLKKQRTKENGLIPYQLHLKELKIIIENQSEYYPFLHEIEEKLEKLLTFRIPYFVGPLAQTKYINPRFNWLVRKSEDHIKPWNFSEIVDEEKSATKFIEKLISNDQFLFGEKVLPKRSIIYQQFLIFNELTKVSYQIKDGPSRNFDSETKEEIFNSLFKKNKLGCVTVVDLKNYIKNDQCLSEKEDIQIEGIKKKFNSSYSTYADLSEISGLKELLDDDTQLDLVEEIIRILTVFEDKKMRTKQLEKLNLPANVDIEKLCKKHYKGWANVSRQLIDGIADRSRGFKKTILDYLKDDDIPNNDAFSTKVQKSLNRNFAQLITDKSLDFARKLDESYKIDVKKDYPSLVEDIPGSPAIRRAILQSLYTVDEIIGVMGRMPKNIVIEMARTNEVSDSPKTRKERIKKLIKETENDADALNFGISKVSEIFDEVKKDENLFKELEVYLYFLQEGKDMYGTETREGHRQPKEINFYDVKNSTGKYHIDHIIPQSLYSGNPLDNIVLTESTNNKIKDKDVPDEATVYEMKNFWLYLMKKGAISKKKFSFLTKIEQGGLSNEDKFGFINR

SEQ ID NO: 187 - protein, 1052 aa, Aminomonas paucivorans
MIGEHVRGGCLFDDHWTPNWGAFRLPNTVRTFTKAENPKDGSSLAEPRRQARGLRRRLRRKTQRLEDLRRLLAKEGVLSLSDLETLFRETPAKDPYQLRAEGLDRPLSFPEWVRVLYHITKHRGFQSNRRNPVEDGQERSRQEEEGKLLSGVGENERLLREGGYRTAGEMLARDPKFQDHRRNRAGDYSHTLSRSLLLEEARRLFQSQRTLGNPHASSNLEEAFLHLVAFQNPFASGEDIRNKAGHCSLEPDQIRAPRRSASAETFMLLQKTGNLRLIHRRTGEERPLTDKEREQIHLLAWKQEKVTHKTLRRHLEIPEEWLFTGLPYHRSGDKAEEKLFVHLAGIHEIRKALDKGPDPAVWDTLRSRRDLLDSIADTLTFYKNEDEILPRLESLGLSPENARALAPLSFSGTAHLSLSALGKLLPHLEEGKSYTQARADAGYAAPPPDRHPKLPPLEEADWRNPVVFRALTQTRKVVNALVRRYGPPWCIHLETARELSQPAKVRRRIETEQQANEKKKQQAEREFLDIVGTAPGPGDLLKMRLWREQGGFCPYCEEYLNPTRLAEPGYAEMDHILPYSRSLDNGWHNRVLVHGKDNRDKGNRTPFEAFGGDTARWDRLVAWVQASHLSAPKKRNLLREDFGEEAERELKDRNLTDTRFITKTAATLLRDRLTFHPEAPKDPVMTLNGRLTAFLRKQWGLHKNRKNGDLHHALDAAVLAVASRSFVYRLSSHNAAWGELPRGREAENGFSLPYPAFRSEVLARLCPTREEILLRLDQGGVGYDEAFRNGLRPVFVSRAPSRRLRGKAHMETLRSPKWKDHPEGPRTASRIPLKDLNLEKLERMVGKDRDRKLYEALRERLAAFGGNGKKAFVAPFRKPCRSGEGPLVRSLRIFDSGYSGVELRDGGEVYAVADHESMVRVDVYAKKNRFYLVPVYVADVARGIVKNRAIVAHKSEEEWDLVDGSFDFRFSLFPGDLVEIEKKDGAYLGYYKSCHRGDGRLLLDRHDRMPRESDCGTFYVSTRKDVLSMSKYQVDPLGEIRLVGSEKPPFVL

SEQ ID NO: 188 - protein, 1023 aa, Helicobacter cinaedi
MKIYSFDIGVASIGWAFIENEVLQDCGIRIFTKAENPKNGASLALPRREARGVRKRLARRRGRLNTIKQLLCKEFGLQLEDYLSNDGELPKAYTASKANPLKSPYELRTLALSQKLDSKDLVRVILHIAKHRGYGNKHAKDSKDTESGKVKKAIEFNRKTLAEKGYRSVGEYLYREFFQQSRISQNNGATEFINVRNKAGNYEHCVAQDMLKEELESILNAQRQFGFSLKQDFENKLLTKIFEQRPLKSFADKVGNCCFIAGEKRAPKDSPSAIEFIALSRTINTLINLSKESGEIYNRAIILQIVESTLKKGEISYKELREIIRLDERLRFKDPRLDYSREIKEAEKVKFLEFKQLKGFKKALGESFTTLAISQLDEIAEHIALIKDRVKLNEKLESYALTKEQREALSNLSFSAHINLSLQALKQILPFMRGDNGEQCLDYDESVEKAGLKALSKDTLKGQMLPPLNEFEPYLSNPVVARALAEYRKVLNVLLKQYGSPHKIHIEYAREAKLSSTERQKYEKEQKDNYAANQAAHKKCQELGLEPSSTNLLKLKLWQEQGGLCLYSGAKITISYLQDPTALQVDHIYPYSRSFDDSYMNKCLVLTKANQEKGNRTPFEAFGTDSAKWGVITTLAQKLPHKKRRRILNTAFNDKEAGFKLRNLNDTSYIARLVADYTETYLEFLPLVESENTTLSKGQKGSKKHIAIVNGVLTSTMRYYLGFASKDRDNHLHHALDAVIIGFMNDSVIKAFSDFKKTQETSKAAYYAHTLSKQEYKKQRAFIQLPSGENFRVSVLEKVESVFVSKPPRKRVRGALHEATFYSPNDPKLLKNYGGTKGVERALALGKMRKVGAKIVSNGAMVRVDIFRHKSSGKFYGVPVYTMDFALGILPNKAVVVGKDQNGVIKDWLEMDSSYEFIFSLYKDDVILVQKKEMQRPELCYFVSFDTSGASIKVAKHDNNFSTLTENQKLLFSNATKEEVVGKSIGIQNLKVFEKWQVSVLGEVKRTQSYPRENISLASKAKK

SEQ ID NO: 189 - protein, 874 aa, Listeria seeligeri
LANGQSEFSWLTRKADGEIRPWNIEEKVDFGKSAIDFIEKMTNKDTYLPKENVLPKHSMCYQKYMVYNELTKIRYTDDQGKTHYFSGQEKQQIFNDLFKQKRKVKKKDLELFLYNMNHVESPTVEGVEDAFNSSFTTYHDLQKVGVPQEILDDPLNTEMLEEIIKILTVFEDKRMINERLQEFSNVLDEAVLKKLERRHYTGWGRLSAKLLIGIRDKESHLTILDYLMNDDKHNRNLMQLINDSNLSFKSIIEKEQVSTADKDIQSIVADLAGSPAIKKGILQSLKIVDELVGIMGYPPQTIVVEMARENQTTGKGKNNSKPRFTSLEKAIKELGSQILKEHPTDNQGLKNDRLYLYYLQNGKDMYTGQELDIHNLSNYDIDHVVPQSFITDNSIDNRVLASSAANREKGDNVPSLEVVRKRKVYWEKLYQAKLMSKRKFDYLTKAERGGLTEADKARFIHRQLVETRQITKNVANILHQRFNCKKDESGNVIEQVRIVTLKAALVSQFRKQFQLYKVREVNDYHHAHDAYLNCVVANTLLKVYPQLEPEFVYGDYHQFDWFKANKATAKKQFYTNIMLFFAKKDRIIDENGEILWDKKYLDTIKKVLNYRQMNIVKKTEIQKGEFSNATANPKGNSSKLIPRKADWDPIKYGGFDGSNMAYAIVIEHEKRKKKTVIKKELIQINIMERTAFEKDQKEFLEGKGYRNPKVITKIPKYTLYECENGRRRMLGSANEAQKGNQMVLPNHLMTLLYHAKNCEASDGKSLAYIESHREMFAELLDSISEFASRYTLADANLEKINTIFEQNKSGDVKVIAQSFVNLLEFNAMGAPASFKYFETNIERKRYNNLKELLNATIIYQSITGLYEARKRLDD

SEQ ID NO: 190 - protein, 1082 aa, Neisseria lactamica
MAAFKPNPMNYILGLDIGIASVGWAMVEIDKEENPIRLIDLGVRVFERAEVPKTGDSLAMARRLARSVRRLTRRRAHRLLRARRLLKREGVLQDADFDENGLVKSLPNTPWQLRAAALDRKLTCLEWSAVLLHLIKHRGYLSQRKNEGETADKELGALLKGVADNAHALQTGDFRTPAELALNKFEKESGHIRNQRGDYSHTFSRKDLQAELNLLFEKQKEFSNPHVSDSLKEGIETLLMAQRPALSGDAVQKMLGHCTFEPAEPKAAKNTYTAERFIWLTKLNNLRILEQGSERPLTDTERATLMDEPYRKSKLTYAQARKLLGLEDTAFFKGLRYGKDNAEAPTLMEMKAYHAISRALEKEGLKDKKSPLNLSTELQDEIGTAFSLFKTDKDITGRLKDRVQPEILEALLKHISFDKFVQISLKALRRIVPLMEQGKRYDEACAEIYGDHYCKKNAEEKIYLPPIPADEIRNPVVLRALSQARKVINCVVRRYGSPARIHIETAREVGKSFKDRKEIEKRQEENRKDREKAAAKFREYFPNFVGEPKSKDILKLRLYEQQHGKCLYSGKEINLVRLNEKGYVEIDHALPFSRTWDDSFNNKVLVLGSENQNKGNQTPYEYFNGKDNSREWQEFKARVETSRFPRSKKQRILLQKFDEEGFKERNLNDTRYVNRFLCQFVADHILLTGKGKRRVFASNGQITNLLRGFWGLRKVRAENDRHHALDAVVVACSTVAMQQKITRFVRYKEMNAFDGKTIDKETGEVLHQKAHFPQPWEFFAQEVMIRVFGKPDGKPEFEEADTPEKLRTLLAEKLSSRPEAVHEYVTPLFVSRAPNRKMSGQGHMETVKSAKRLDEGISVLRVPLTQLKLKGLEKMVNREREPKLYDALKAQLETHKDNPAKAFAEPFYKYDKAGNRTQQVKAVRIEQVQKTGVWVRNHNGIADNATMVRVDVFEKGGKYYLVPIYSWQVAKGILPDRAVVAFKDEEDWTVMDDSFEFRFVLYANDLIKLTAKKNEFLGYFVSLNRATGAIDIRTHDTDSTKGKNGIFQSVGVKTALSFQKNQIDELGKEIRPCRLKKRPPVR

SEQ ID NO: 191 - protein, 1326 aa, Streptococcus pseudoporcinus
MLGTVLFDSGETAQARRLKRTNRRRYTRRRYRLCQLQNIFATEMVKVDDTFFQRLSESFFYYQDKAFDKHPIFGNSKEERAYHKTYPTIYHLRKDLADRDQKADLRLIYLALSHIIKFRGHFLIEGKLNSENTDVQKLFIALVTVYNLLFEEEPIAGETCDAKALLTAKTSKSKRLESLISEFPGQKKNGLFGNLLALALGLRPNFKSNFGLSEDAKLQITKDTYEEELDNLLAEIGDHYADLFLAAKNLSDAILLSDILTLSDENTRAPLSASMIKRYEEHQEDLALLKKLVKEQMPEKYWEIFSNAKKNGYAGYIEGKVSQEDFYRYIKPILSRLKGGDEFLAKIDRDDFLRKQRTFDNGSIPHQIHLKELHAILRRQEKYYPFLAEQKEKIEQLLCFRIPYYVGPLAKGGNSSFAWLKRRSDEPITPWNFKDVVDEEASAQAFIEGMTNYDTYLPEEKVLPKHSPLYEMFTVYNELTKVKYIAENMTKPLYLSAEQKEAIIDHLFKQTRKVTVKDLKEKYFSQIEGLENVDVTGVEGAFNASLGTYNDLLKIIKDKAFLDDEANAEILEEIVLILTLFQDEKLIEKRLAKYANLFEKSVLKKLRKRHYRGWGRLSRQLIDGMKDKASGKTILDFLKADDFANRNFIQLINDSSLDFEKLIDDAQKKAIKRESLTEAVANLAGSPAIKKGILQSLKVVDEIVKVMGHNPDNIVIEMSRENQTTAQGLKNARQRLKKIKEVHKKTGSRILEDNSERITNLTLQDNRLYLYLLQDGKDMYTGQDLDINNLSQYDIDHIIPQSFIKDNSIDNLVLTTQKANRGKSDNVPSIEVVRDMKDRVWRRQLANGAISRQKFDHLTKAERGGLADSDKARFLRRQLVETRQITKHVAQLLDSRFNSKSNQNKKLARNVKIITLKSKIVSDFRKDFGLYKLREVNNYHHAHDAYLNAVVGTALLKKYPKLEAEFVYGDYKHFDLVKLISKSDPSLGKATAKVFFYSNIMNFFKEELSLADGTLMKRPVIETNTETGEVVWDKVKDFKTIRKVLSYPQVNIVKKTEIQSGAFSKESVLSKGNSDKLIERKKGWDPKKYGGFDSPNTAYSIFVVAKVAKRKAQKLKTVKEIVGITIMEQAEYEKDNIAFLEKKGYQDIQEKLLIKLPKYSLFELENGRRRLLASANEFQKGNELALSGKYMKFLYLASRYDKLSSKIESEQQKKLFVEQHLHYFDEILDIVVKHATCYIKAENNLKKIISLYKKKEAYSINEQALNMLNLFIFTSLGAPSTFVFFDETIDRKRYTTSSDVLNGILIQQSITGLYETRIDLSRFGGD

SEQ ID NO: 192 - protein, 1150 aa, Enterococcus faecalis
MYSIGLDLGISSVGWSVIDERTGNVIDLGVRLFSAKNSEKNLERRTNRGGRRLIRRKTNRLKDAKKILAAVGFYEDKSLKNSCPYQLRVKGLTEPLSRGEIYKVTLHILKKRGISYLDEVDTEAAKESQDYKEQVRKNAQLLTKYTPGQIQLQRLKENNRVKTGINAQGNYQLNVFKVSAYANELATILKTQQAFYPNELTDDWIALFVQPGIAEEAGLIYRKRPYYHGPGNEANNSPYGRWSDFQKTGEPATNIFDKLIGKDFQGELRASGLSLSAQQYNLLNDLTNLKIDGEVPLSSEQKEYILTELMTKEFTRFGVNDVVKLLGVKKERLSGWRLDKKGKPEIHTLKGYRNWRKIFAEAGIDLATLPTETIDCLAKVLTLNTEREGIENTLAFELPELSESVKLLVLDRYKELSQSISTQSWHRFSLKTLHLLIPELMNATSEQNTLLEQFQLKSDVRKRYSEYKKLPTKDVLAEIYNPTVNKTVSQAFKVIDALLVKYGKEQIRYITIEMPRDDNEEDEKKRIKELHAKNSQRKNDSQSYFMQKSGWSQEKFQTTIQKNRRFLAKLLYYYEQDGICAYTGLPISPELLVSDSTEIDHIIPISISLDDSINNKVLVLSKANQVKGQQTPYDAWMDGSFKKINGKFSNWDDYQKWVESRHFSHKKENNLLETRNIFDSEQVEKFLARNLNDTRYASRLVLNTLQSFFTNQETKVRVVNGSFTHTLRKKWGADLDKTRETHHHHAVDATLCAVTSFVKVSRYHYAVKEETGEKVMREIDFETGEIVNEMSYWEFKKSKKYERKTYQVKWPNFREQLKPVNLHPRIKFSHQVDRKANRKLSDATIYSVREKTEVKTLKSGKQKITTDEYTIGKIKDIYTLDGWEAFKKKQDKLLMKDLDEKTYERLLSIAETTPDFQEVEEKNGKVKRVKRSPFAVYCEENDIPAIQKYAKKNNGPLIRSLKYYDGKLNKHINITKDSQGRPVEKTKNGRKVTLQSLKPYRYDIYQDLETKAYYTVQLYYSDLRFVEGKYGITEKEYMKKVAEQTKGQVVRFCFSLQKNDGLEIEWKDSQRYDVRFYNFQSANSINFKGLEQEMMPAENQFKQKPYNNGAINLNIAKYGKEGKKLRKFNTDILGKKHYLFYEKEPKNIIK

SEQ ID NO: 193 - protein, 1150 aa, Enterococcus faecalis
MYSIGLDLGVSSVGWSVIDERTGNVIDLGVRLFSAKNSEKNLERRTNRGGRRLIRRKTNRLKDAKKILAAVGFYEDKSLKNSCPYQLRVKGLTEPLSKGEIYKVTLHILKKRGISYLDEDDTEAAKESQDYKEQVRENAQLLTKYTPGQIQLQRLKENNRVKTGINAQGNYQLNVFKVSAYANELATILKTQQAFYPNELTDDWIALFVQPGIAEEAGLIYRKRPYYHGPGNEANNSPYGRWSDFKKTGQPATNIFDKLIGKDFQGELRASGLSLSAQQYNLLNDLTNLKIDGEIPLSPEQKEYILAELMTKEFTRFGINDVAKLLGVKKERLSGWRLDKKGKPEIHTLKGYRNWRKIFAESGIDLATLPTETIDCLAKVLTLNTEREGIENTLAFELPELAESVKLLVLDRYKELSQSVSTQAWHRFSLKTLHLLIPELMNATSEQNTLLEQFQLKSDVRKRYSEYKKLPTKDVLTEIYNPTVNKTVSQAFKVIDALLVKYGKEQIRYITIEMPRDDNEEDEKKRIKELHAKNSQRKNDSQSYFMQKSGWSQEKFQTTIQKNRRFLAKLLYYYEQDGICAYTGLSISPELLVSDSTEIDHIIPISISLDDSINNKVLVLSKANQVKGQQTPYDAWMDGSFKKINGKFSNWDDYQKWVESRHFSHKKENNLLETRNIFDSEQVEKFLARNLNDTRYASRLVLNTLQSFFANQETKVRVVNGSFTHTLRKKWGADLDKTRETHHHHAVDATLCAVTPFVKVSRYHYAVKEETGEKVMREIDFETGEIVDEMSYREFKKSKKYERKTYQVKWPNFREQLKPVNLHPRIKFSHQVDRKANRKLSDATIYSVREKTEVKTLKSGKQKITTDEYTIGKIKDIYTVDGWEAFKKKQDKLLMKDLDEKTYERLLSIAETTPDFQEVEEKNGKVKRVKRSPFAVYCEENDIPAIRKYAKNNNGPLIRSLKYYDGKLNKHINITKDSQGRPVEKTKNGRKVTLQSLKPYRYDIYQDLETKAYYTVQLYYSDLRFVEGKYGITEKEYMKKVAEQTKGQVVRFCFSLQKNDGLEIEWKDSQCYDVRFYNFQSANSINFKGLEQEMMPAENQFKQKPYNNGAINLNIAKYGKEGKKLRKFNTDILGKKHYLYYEKEPKNIIK

SEQ ID NO: 194 - protein, 1345 aa, Streptococcus anginosus
MDQKYSIGLDIGTNSVGWAVVTDDYKVPAKKMKVLGNTDKQSIKKNLLGALLFDSGETAEATRLKRTARRRYTRRRNRLRYLQEIFAEEMNKVDENFFQRLDDSFLVDEDKRGERHPIFGNIAAEVKYHDDFPTIYHLRKHLADISQKADLRLVYLALAHMIKFRGHFLIEGQLKAENTNVQALFKDFVEVYDKTVEESHLSEMTVDALSILTEKVSKSRRLENLIAHYPAEKKNTLFGNLIALSLGLQPNFKTNFQLSEDAKLQFSKDTYEEDLEGLLGEIGDEYADLFASAKNLYDAILLSGILTVDDNSTKAPLSASMVKRYEEHQKDLKKLKDFIKVNAPDQYNAIFKDKNKKGYAGYIENGVKQDEFYKYLKGILLQINGSGDFLDKIDREDFLRKQRTFDNGSIPHQIHLQEMHAILRRQEEHYPFLKENQDKIEKILTFRIPYYVGPLARKGSRFAWAEYKADEKITPWNFDDILDKEKSAEKFITRMTLNDLYLPEEKVLPKHSLLYETFTVYNELTKVKYVNEQGEAKFFDANMKQEIFDHVFKENRKVTKDKLLNYLNKEFEEFRIVNLTGLDKENKAFNSSLGTYHDLRKILDKSFLDDKANEKTIEDIIQTLTLFEDREMIRQRLQKYSDIFTKAQLKKLERRHYTGWGRLSYKLINGIRNKENKKTILDYLIDDGYANRNFMQLINDDALSFKEEIARAQIIGDVDDIANVVHDLPGSPAIKKGILQSVKIVDELVKVMGHNPANIIIEMARENQMTDKGRRNSQQRLKLLQDSLKNLDNPVNIKNVENQQLQNDRLFLYYIQNGKDMYTGETLDINNLSQYDIDHIIPQAFIKDNSLDNRVLTRSDKNRGKSDDVPSIEVVHEMKSFWSKLLSVKLITQRKFDNLTKAERGGLTEEDKAGFIKRQLVETRQITKHVAQILDERFNTEFDGNKRRIRNVKIITLKSNLVSNFRKEFELYKVREINDYHHAHDAYLNAVVGNALLLKYPQLEPEFVYGEYPKYNSYRSRKSATEKFLFYSNILRFFKKEDIQTNEDGEIAWNKEKHIKILRKVLSYPQVNIVKKTEEQTGGFSKESILPKGESDKLIPRKTKNSYWNPKKYGGFDSPVVAYSILVFADVEKGKSKKLRKVQDMVGITIMEKKRFEKHPVDFLEQRGYRNVRLEKIIKLPKYSLFELENKRRRLLASARELQKGNELVIPQRFTTLLYHSYQIEKNYEPEHREYVEKHKDEFKELLEYISVFSRKYVLADNNLTKIEMLFSKNKDAEVSSLAKSFISLLTFTAFGAPAAFNFFGENIDRKRYTSVTECLNATLIHQSITGLYETRIDLSKLGED

SEQ ID NO: 195 - protein, 849 aa, Listeria ivanovii
  misc_feature (780)..(780): Xaa can be any naturally occurring amino acid
LIDKNGTPQHITMIDKMRGKCTYFPEEVRIAKMSYTAELFGLLNDFNNIYFADPETGEKIGFTEADKKYFIDTFIHDQKGVKNITLKQIMKHKNIINETDIFGYRINTKNGTPIFTEFKGLKALKKALKEVDLPDEFYQNTEMMDEIANILSSEKSFTRREEQLKELFLAAFNDELEEAVKELINDITFKEFHSLSKKAIMVILPELWSTNQNQMQLFVQHKMDKSRLENLQNGTKIQFDDEAILSTIAKRAHRETIKIVDAVRAKYGELDYVIVEMAREKNSDEQKKVYNRAQKKQGDFEKEMCKLLGVSELKELRLNGKQHLALKFWKEQDGKCIYSGKPIALSDIVNNFNGLLEIDHIIPISISYDDSQQNKVLCLRSENQRKGQLSPYQYLIRGMGERSFDAFKAEVLSRHFGKKKQNYLLEMEDIANNDELRKHFINRNLVDTRYAMRTFSNTLKTFYTVNGIPTKVMPVNGAMTSALRKRAKLNKDRDAGHAHHAIDALIVAAIGRLPLIKQLAELRVNEEGEFADKITDKGLDDKTAFDDKTLKFLRNLLNYESKVKYSHKVDRKPNRSLSKQTLYSTREKDGEKYIIGKVKNIYTLDKAGYAALKKRIDKNPEDFLMAQHNPKTWEEIIKIMEVYSKADNPFKEFYDEHGFIMKDGKVPVKSLRYHDKKLGIHVPLTHKYENTRHDVVLLKRNSLRVDIYMNKEGVYKYQGVPYNWFNQKGDKYILDMEKYHNEIDGTRASFKNIDNTFEFQFSLYKNDVFSYMKKDKEGEXVSYTKLFRSDSSPRENRLEVENIDMRTSSQQMPTINPLKNLIKYNTDILGNTYPIQKEKFVTVFTLHSK

SEQ ID NO: 196 - protein, 1457 aa, Prevotella buccae
MKTILGLDLGTNSIGWAKVSVDDYGNYLHDIKLGSRIIPMSQDVLGNFDSGVTVSQTAQRTEFRSKRRLVQRNLQRRERLHRVLHVLDFLPAHYDAAIGWDRTEAVTYGKFLNHAEPKLAWEELGNGKRRFLFMDSFHEMVADFARCQPALVADGKKIPLDWTIYYLRKKALTQAITKEELAWILLNFNQKRGYYQLRGEEEEENPTKQEEYYELKVVSVEATDSRKGNDTWYNVHLENGWIYRRSSKISLDDWVGKVKQFIVTTEYEKDGATLKTDKEGYVKRSFRAPNENDWGLRKKRTETLLEMSGKTVGAFIYDHLLQEPADKIRGNFIRTIERHYYKAELEAILAEQCKYHIELRDKEMLEACARELYLNNLPHQRSLMKKDMTYLLLYDLIFYQRPLKSKKALIANCPYEYYEYVDKETGEIKRQNIKCIAKSNPYFQEFRLWQFVLNLRLFDRVEDKEVTANYLPTADDHARLFTYLNDRKEINQETLLKDYFKLKKVKIGNEKEYPIRWNYIEDKEKKYPCNETRYELLMALDRAGIEHKWLDDNNLEYRLWHLLYSVEVKSESETALRKLKNDDAFVNSFLKVKPFKKEYGAYSEKAIKRLLAVMRKGFLWNEQDICDETRKRIEIIIKGDVDEKVKERMGHAAYSFDRVSDFQGLPEWLACYVVYGRHSEAMDIQHWDSPERLMAYINNFKQYSLRNPIVEQCILETLRTVHDIWKETGQIDEIHVELGREMKSTSEERARRTQNVLRNENTNLRIKSLLIELKNDTDICNVHPYSPMQQEILRIYEEGALQELNREDEDFEEISKISQMSQPSGKELNRYKLWLEQKYRSPYTGKAISLAKLFTPAYQIEHVIPQSRYFDDSFTNKVICEAEVNTLKSNLLGYEFIKKHGGEIIHCTTLGDVRIFSESEYKAFVMDHYANNKSKKDKLLMEDIPQEFLSRQMNDSRYISKVVKTLLSNIVRMADESEATSKSVIVCTGGVTDRLKKDWGLNDVWNSIVYSRFERLNRLTGTEAFGHWENKDGKRVFQTSMPLELQRGFRKKRIDHRHHAMDALVIACASRNIVNYLNNESANNPKKREDLRRQLCDKNRVIRKPWETFTQDAYNALENVVVSFKNYVRVINKATNRYEHYDENGKKRFVQQKGSELWAIRKPMHKETYYGHVNLRRKELVTLQKALDDIPSICDKKLRDYISALVEKHFNKRQLLAHFKSTDYYWQKQYVNKVYVWTFSDDIKPLVATRKLLDTSFDAKRIGTITDTGIQKILRNYLEAKGGNATLAFTPEGIAEMNQNISKYNDGKPHQPILKVRITEPMGAKYRVGQTGNKMAKYVEAQSGTNLYFAIYEDSEGKRSYTTVPLDEVAERLKQRLSPVPEKDENDVPLKFYLSPNDLVYVPTEEELQLRECKLNKDRIYKMVSSTGNECHFIPYYVANVIYNKGGFNMQMHRPQS

SEQ ID NO: 197 - protein, 1330 aa, Enterococcus italicus
MKNDYTIGLDIGTNSVGYSVVTDDYKVISKKMNVFGNTEKKSIKKNFWGVRLFESGQTAQEARMKRTSRRRIARRKNRICYLQEIFQPEMNHLDNNFFYRLNESFLVADDAKYDKHPIFGTLDEEIHFHEQFPTIYHLRKYLADGDEKADLRLVYLAIAHIIKFRGNFLIEGELNTENNSVIELSKVFVQLYNQTLSELEGFQFIDESIDFSEVLTQQLSKSERADNVLKLFPDEKGTGIFAQFIKLIVGNQGNFKKVFQLEEDQKLQLSTDDYEENIENLLAIIGDEYGDIFVAAQNLYQAILLAGILTSTEKTRAKLSASMIQRYEEHAKDLKLLKRFVKEHIPDKYAEIFNDATKNGYAGYIDGKTKEEEFYKYLKTTLVQKSGYQYFIEKIEQENFLRKQRIYDNGVIPHQVHAEELRAILRKQEKYYSFLKENHEKIEQIFKVRIPYYVGPLAKHNEQSRFAWNIRKSDEPIRPWNMNDVVDENASAVAFIERMTIKDIYLNENVLPRHSLIYEKFTVFNELTKVLYADDRGVFQRFSAEEKEDIFEKLFKSERKVTKKKLENYLRIELSISSPSVKGIEEQFNANFGTYLDLKKFDELHPYLDDEKYQDTLEEVIKVLTVFEDRSMIQNQLEQLPLNLSTKTIKALSRRKYTGWGRLSARLIDGIHDKNSGKTILDYLIEDESDSYIVNRNFMQLINDDHLSFKKIIEDSQPYKEQQSAEEIVSELSGSPAIKKGILQSLKIVDELVAIMGYKPKNIVVEMARENQTTGRGKQNSKPRLKGIENGLKEFSDSVLKGSSIDNKQLQNDRLYLYYLQNGKDMYTGHELDIDHLSTYDIDHIIPQSFLTDNSIDNRVLTTSKSNRGKSDNVPSEEVVRKMDRFWRKLLNAKLISERKYTNLTKKELTESDKAGFLKRQLVETRQITKHVATILDSKFNEDSNNRDVQIITLKSALVSEFRKTFNLYKVREINDLHHAHDAYLNAVVALSLLRVYPQLKPEFVYGEYGKNSIHDQNKATIKKQFYSNITRYFASKDYIINDDGEILWNKQETIAQVIKTLGMHQVNVVKKVEIQKGGFSKESIQPKGESQKLIRRKQQWNTKKYGGFDSPVVAYAILLSFDKGKRKARSFKIVGITIQDRESFEGNPILYLSKKDYHNPKVEAILPKYSLFEFENGRRRMVASASETQKGNQLIIPGHLMELLYHSKKIINGKNSDSVSYIQNNKEKFREIFEYIVDFSSKYISADANLNKIEKIFENNFHKASEQEIAKSFINLLTFTAMGAPADFEFFGEKIPRKRYVSISEIIDAVFIHQSITGLYETRVRLTEV

SEQ ID NO: 198 - protein, 1123 aa, Mobiluncus curtisii
MFVYLNSPRGFGPATFLTDLPHFCIIFGNNDFMDNRKYHVGIDVGTNSVGFAAVEVGDSGSPIRFLNTMVVIHDSGVDPEQKKYAITRLASAGTARRTRRLYRTRRQRLRELDDFISNELGYPLVNLENFADPYEPWKVRADLATIKLPADELPEAMSIALRHMARHRGWRSPYQRVEALHLHAEISEEFSALKKRVMEKTGDVFSDDATPAEVLVDLMGRQKIRGADGMLSGKLRQSDNANELRKIASVQGIDDETLNRIIDRVFFSRSPKGKASERVGMDALPGQGSKPRALKAMPSFQKFRIVSVICNLRIKDSGDDNRPLSMEEKEQLIGYLMSSTTDDHVTWTDVAELLHVKRSNLQGTAKEGPDGERPYTRPPVNSAWSKIKDSKIKSLVALWKTGDVDVQSAIVEALSNASVLEDARPGADIVVAYLESLDDKELESLDKVGLPAGRASYSEDSLERLTERMLQDDCDLFEARKREFGVSDDWKPPADPIYAPVGNPGVDRVLKIVNRLLMAAEREWGAPTQINIEHVRSGFSSELMQREFERENERRRAQNEEAVKAILTEKGGNSHVSKYDIIRYYAVKRQNCQCLYCGTPITFSDCELDHIVPRKGVGSTNSRVNLAAACRSCNRDKSNLPFAVWAGKTSNFDVSIDGAVSRVKQWQRSQNEGAREFRAFQNEVISRLLKTTEDPEIDSRSLESVAWMARELHHRVEYYFQSKGAQTQVSVYRGAVTAQARKSSGLEDKVKMIGGGGKTRLDRRHHAMDAATIALMTPGISTTLSEKNNLRDAQKFTGQSETWKDYCGRTETAREHFAVWKSNMERLTDLFNDKLENDAIPVVQPLRLRLSDSKAHDDGIGKLDSKKLGSVWSLADIDRAATPQIWTALTRCDDFDPTKGLPENANRVIRAQGVKYESEDNIPVFPSNVAAIAVRDGYAEIGSTIHHARIYRIDDGKKIFYSMIRVFAVDLLKHQAEDLFTVKLPPSAISIRTCEDSLRRALSNGTAEYLGWLVPGDEIIVDTSDKAFHTGQIGDLLRNFPVNSFRLTGFPSNSRLRLKPVLLAGEGLRDDAEDSIKKILSGQGWRPAINVLFSKGKPRIVRRNSLGIERPSSNNGLPFSWEA

SEQ ID NO: 199 - protein, 1054 aa, Staphylococcus lugdunensis
MNQKFILGLDIGITSVGYGLIDYETKNIIDAGVRLFPEANVENNEGRRSKRGSRRLKRRRIHRLERVKKLLEDYNLLDQSQIPQSTNPYAIRVKGLSEALSKDELVIALLHIAKRRGIHKIDVIDSNDDVGNELSTKEQLNKNSKLLKDKFVCQIQLERMNEGQVRGEKNRFKTADIIKEIIQLLNVQKNFHQLDENFINKYIELVEMRREYFEGPGKGSPYGWEGDPKAWYETLMGHCTYFPDELRSVKYAYSADLFNALNDLNNLVIQRDGLSKLEYHEKYHIIENVFKQKKKPTLKQIANEINVNPEDIKGYRITKSGKPQFTEFKLYHDLKSVLFDQSILENEDVLDQIAEILTIYQDKDSIKSKLTELDILLNEEDKENIAQLTGYTGTHRLSLKCIRLVLEEQWYSSRNQMEIFTHLNIKPKKINLTAANKIPKAMIDEFILSPVVKRTFGQAINLINKIIEKYGVPEDIIIELARENNSKDKQKFINEMQKKNENTRKRINEIIGKYGNQNAKRLVEKIRLHDEQEGKCLYSLESIPLEDLLNNPNHYEVDHIIPRSVSFDNSYHNKVLVKQSENSKKSNLTPYQYFNSGKSKLSYNQFKQHILNLSKSQDRISKKKKEYLLEERDINKFEVQKEFINRNLVDTRYATRELTNYLKAYFSANNMNVKVKTINGSFTDYLRKVWKFKKERNHGYKHHAEDALIIANADFLFKENKKLKAVNSVLEKPEIESKQLDIQVDSEDNYSEMFIIPKQVQDIKDFRNFKYSHRVDKKPNRQLINDTLYSTRKKDNSTYIVQTIKDIYAKDNTTLKKQFDKSPEKFLMYQHDPRTFEKLEVIMKQYANEKNPLAKYHEETGEYLTKYSKKNNGPIVKSLKYIGNKLGSHLDVTHQFKSSTKKLVKLSIKPYRFDVYLTDKGYKFITISYLDVLKKDNYYYIPEQKYDKLKLGKAIDKNAKFIASFYKNDLIKLDGEIYKIIGVNSDTRNMIELDLPDIRYKEYCELNNIKGEPRIKKTIGKKVNSIEKLTTDVLGNVFTNTQYTKPQLLFKRGN

SEQ ID NO: 200 - protein, 586 aa, Pseudoramibacter alactolyticus
MTYYLGLDMGTGSVGWAATDKNYKLIRAKGKDLWGVRLFQTAKTAAERRSHRVARLRRQREKVRIGYLKTIFSDAINKVDPGFFQRLDDSFFYAEDKNINQPYALFADTGYTDVDYYRDYPTIFHLRSTLIHDTSPKDVRLVYLAVLNMFKHRGHFLASNLSENGVDDFGDIYQQWCKSVPKPVQISDPEAKTEKIENILSKAGISNTRRLEALLEVFGIKRRDAFAEVLKLWCGLKGNLSKIWSETDFSDLDNTKPALSFKDSNLDMVLSQLEEILPDEDYSWLMLTKQIYDWSLLSGMMKDASGKSYDYLSDARVASYQKHSEDLKTLKRFYHDNHLSAAYDQMFRVMGKDNYSAYAGSVQSKKEVVRRGASCGIEELYKRIKKDLKPVPDCETKQIILENIERGTFLPKQLTRDNGVIPNQIHVHELKAILKNAENYLPFLKEGSELTNSEKILQLFQFQIPYYVGPLYSDENNYAWVVRKEGGRVFPWNFAEKVDEKASAEGFISELVARCTYLDNEKVLPKASLLYEKFMVLNELNNLRINGERISVDIKQELYQNLFTRGKKVTLKKSEGLFGGQRIFCL

SEQ ID NO: 201 - protein, 1385 aa, Gemella morbillorum
MKNKTWYLGLGVGPTSIGWAATDSNYKLLRKNKKRLWGVRLFEEAKTAVDRRTFRAERRRLARRKWRISLLEELFAKEVSKNDPNFFLRLKESKYHFEDKSLMNEYILFNDKDYTDKDYYKEYPTIYHLRLSLTTEENPDIRKVYLAVHSMLKNRGHFLLQGQSFNDSNIDSVIKELLELETVKINFEVTDEVIHSLKKIALEKKNLSDKNNDVKKLYPKEKQLQEIFKLVFGGKTSLDKLYDIEEYKELDNSVKSISFKEKVYEEVRPDYEQILSNYIELLDLAKLVYDSIVLADIKKEGKTISESKVELYNKHKDDLANLKKLVKIDSKLSEDKKKEVYFTIFKEDKEKGTNYVNYTHRSQEGKSCSYEDFKKFLKKELEKLEDSPTKTTILEELDLETFLPLQRTKDNSVVPYQIHKEELVKILDNAAKYHSFLAEKDDSGYSTREKVVQLFEFRIPYYIGPLNAHHNTENGGYSWAIRKKGMESVPVTPWNFKDVIDESASAEAFVNNLKNKCAYLSGEDVLPKNSLLYSEYALLNELNALRYEGNRISVEARDVIVTKLFKEQGKKVTKKTIKELLKTEGFIDGKGEIVGIDNIVKNDLKSYRDFKKILADKFDKERVENIILWITLYGESRKLIKEKITKVYGDFYTVDEIEKMSRLTYKDWGILSRKLLTELVSEKLYNEETGECLNIIGAMRQGTILFMELLADKFDYMSQIKNHNKENKDDITEITPDILENLHASPAVKRSIWQTVRIVEELKTIIGCVPTKIFIETTKRNNAPYKVPTLNRNDLVTKYKTIREHEIFELEKELKNTLDFTLNKNRLINEEPSKLKATKLYLYYTQLGRCMYTGKKIDLGELFDNNNKYDIDHIYPQSKVKDGSFNNIVLVTKASNDMKADVFPLKSKFQTKENKIFWRFLKEKKLITEEKYNRLVRTEEFSNGELTGFITRQLVETSQAIKVISNVLRELNPETTICYSKAENVSSFRQSFGKIKEANRKAENNEKLIRVQEINDYYNAKDAYLSIVVGNVYDVKFTRNVHNFIKNNKDARRYSLNGLFYTDVKNANTIAWEMDKTVHVVEKTMNNNNILITRRTSEQKGALYDATLYKAKVAEKAKEGTYYPLKTTDSKIKDVGKYGGFTKIKIAYYSIFEYTLDGKKGKQKITRIVPIPIYISQNIKDDKALLEYAQTRLPGKDLKIKYRKLCIGSLVKINNFNYYIGGKTNNNFTFDSAVQVILDKDSESYIKELAKYLNWKKENKDGKLWESITEDKNIQLYDSLVKKMNTGIFIRKTPNKYTELLTLEVKNKFINIDIDEQVKLLLEILNLLTNKKFTSKLNEIGITASRGVCSFNLSNQSQFSIIEQSVTGVYEKEKLIIEKKKEGIL

SEQ ID NO: 202 - protein, 1029 aa, Alicycliphilus denitrificans
MRSLRYRLALDLGSTSLGWALFRLDACNRPTAVIKAGVRIFSDGRNPKDGSSLAVTRRAARAMRRRRDRLLKRKTRMQAKLVEHGFFPADAGKRKALEQLNPYALRAKGLQEALLPGEFARALFHINQRRGFKSNRKTDKKDNDSGVLKKAIGQLRQQMAEQGSRTVGEYLWTRLQQGQGVRARYREKPYTTEEGKKRIDKSYDLYIDRAMIEQEFDALWAAQAAFNPTLFHEAARADLKDTLLHQRPLRPVKPGRCTLLPEEERAPLALPSTQRFRIHQEVNHLRLLDENLREVALTLAQRDAVVTALETKAKLSFEQIRKLLKLSGSVQFNLEDAKRTELKGNATSAALARKELFGAAWSGFDEALQDEIVWQLVTEEGEGALIAWLQTHTGVDEARAQAIVDVSLPEGYGNLSRKALARIVPALRAAVITYDKAVQAAGFDHHSQLGFEYDASEVEDLVHPETGEIRSVFKQLPYYGKALQRHVAFGSGKPEDPDEKRYGKIANPTVHIGLNQVRMVVNALIRRYGRPTEVVIELARDLKQSREQKVEAQRRQADNQRRNARIRRSIAEVLGIGEERVRGSDIQKWICWEELSFDAADRRCPYSGVQISAAMLLSDEVEVEHILPFSKTLDDSLNNRTVAMRQANRIKRNRTPWDARAEFEAQGWSYEDILQRAERMPLRKRYRFAPDGYERWLGDDKDFLARALNDTRYLSRVAAEYLRLVCPGTRVIPGQLTALLRGKFGLNDVLGLDGEKNRNDHRHHAVDACVIGVTDQGLMQRFATASAQARGDGLTRLVDGMPMPWPTYRDHVERAVRHIWVSHRPDHGFEGAMMEETSYGIRKDGSIKQRRKADGSAGREISNLIRIHEATQPLRHGVSADGQPLAYKGYVGGSNYCIEITVNDKGKWEGEVISTFRAYGVVRAGGMGRLRNPHEGQNGRKLIMRLVIGDSVRLEVDGAERTMRIVKISGSNGQIFMAPIHEANVDARNTDKQDAFTYTSKYAGSLQKAKTRRVTISPIGEVRDPGFKG

SEQ ID NO: 203 - protein, 1422 aa, Sutterella wadsworthensis
MTQSERRFSCSIGIDMGAKYTGVFYALFDREELPTNLNSKAMTLVMPETGPRYVQAQRTAVRHRLRGQKRYTLARKLAFLVVDDMIKKQEKRLTDEEWKRGREALSGLLKRRGYSRPNADGEDLTPLENVRADVFAAHPAFSTYFSEVRSLAEQWEEFTANISNVEKFLGDPNIPADKEFIEFAVAEGLIDKTEKKAYQSALSTLRANANVLTGLRQMGHKPRSEYFKAIEADLKKDSRLAKINEAFGGAERLARLLGNLSNLQLRAERWYFNAPDIMKDRGWEPDRFKKTLVRAFKFFHPAKDQNKQHLELIKQIENSEDIIETLCTLDPNRTIPPYEDQNNRRPPLDQTLLLSPEKLTRQYGEIWKTWSARLTSAEPTLAPAAEILERSTDRKSRVAVNGHEPLPTLAYQLSYALQRAFDRSKALDPYALRALAAGSKSNKLTSARTALENCIGGQNVKTFLDCARRYYREADDAKVGLWFDNADGLLERSDLHPPMKKKILPLLVANILQTDETTGQKFLDEIWRKQIKGRETVASRCARIETVRKSFGGGFNIAYNTAQYREVNKLPRNAQDKELLTIRDRVAETADFIAANLGLSDEQKRKFANPFSLAQFYTLIETEVSGFSATTLAVHLENAWRMTIKDAVINGETVRAAQCSRLPAETARPFDGLVRRLVDRQAWEIAKRVSTDIQSKVDFSNGIVDVSIFVEENKFEFSASVADLKKNKRVKDKMLSEAEKLETRWLIKNERIKKASRGTCPYTGDRLAEGGEIDHILPRSLIKDARGIVFNAEPNLIYASSRGNQLKKNQRYSLSDLKANYRNEIFKTSNIAAITAEIEDVVTKLQQTHRLKFFDLLNEHEQDCVRHALFLDDGSEARDAVLELLATQRRTRVNGTQIWMIKNLANKIREELQNWCKTTNNRLHFQAAATNVSDAKNLRLKLAQNQPDFEKPDIQPIASHSIDALCSFAVGSADAERDQNGFDYLDGKTVLGLYPQSCEVIHLQAKPQEEKSHFDSVAIFKEGIYAEQFLPIFTLNEKIWIGYETLNAKGERCGAIEVSGKQPKELLEMLAPFFNKPVGDLSAHATYRILKKPAYEFLAKAALQPLSAEEKRLAALLDALRYCTSRKSLMSLFMAANGKSLKKREDVLKPKLFQLKVELKGEKSFKLNGSLTLPVKQDWLRICDSPELADAFGKPCSADELTSKLARIWKRPVMRDLAHAPVRREFSLPAIDNPSGGFRIRRTNLFGNELYQVHAINAKKYRGFASAGSNVDWSKGILFNELQHENLTECGGRFITSADVTPMSEWRKVVAEDNLSIWIAPGTEGRRYVRVETTFIQASHWFEQSVENWAITSPLSLPASFKVDKPAEFQKAVGTELSELLGQPRSEIFIENVGNAKHIRFWYIVVSSNKKMNESYNNVSKS

SEQ ID NO: 204 - protein, 1132 aa, Nitratifractor salsuginis
MKKILGVDLGITSFGYAILQETGKDLYRCLDNSVVMRNNPYDEKSGESSQSIRSTQKSMRRLIEKRKKRIRCVAQTMERYGILDYSETMKINDPKNNPIKNRWQLRAVDAWKRPLSPQELFAIFAHMAKHRGYKSIATEDLIYELELELGLNDPEKESEKKADERRQVYNALRHLEELRKKYGGETIAQTIHRAVEAGDLRSYRNHDDYEKMIRREDIEEEIEKVLLRQAELGALGLPEEQVSELIDELKACITDQEMPTIDESLFGKCTFYKDELAAPAYSYLYDLYRLYKKLADLNIDGYEVTQEDREKVIEWVEKKIAQGKNLKKITHKDLRKILGLAPEQKIFGVEDERIVKGKKEPRTFVPFFFLADIAKFKELFASIQKHPDALQIFRELAEILQRSKTPQEALDRLRALMAGKGIDTDDRELLELFKNKRSGTRELSHRYILEALPLFLEGYDEKEVQRILGFDDREDYSRYPKSLRHLHLREGNLFEKEENPINNHAVKSLASWALGLIADLSWRYGPFDEIILETTRDALPEKIRKEIDKAMREREKALDKIIGKYKKEFPSIDKRLARKIQLWERQKGLDLYSGKVINLSQLLDGSADIEHIVPQSLGGLSTDYNTIVTLKSVNAAKGNRLPGDWLAGNPDYRERIGMLSEKGLIDWKKRKNLLAQSLDEIYTENTHSKGIRATSYLEALVAQVLKRYYPFPDPELRKNGIGVRMIPGKVTSKTRSLLGIKSKSRETNFHHAEDALILSTLTRGWQNRLHRMLRDNYGKSEAELKELWKKYMPHIEGLTLADYIDEAFRRFMSKGEESLFYRDMFDTIRSISYWVDKKPLSASSHKETVYSSRHEVPTLRKNILEAFDSLNVIKDRHKLTTEEFMKRYDKEIRQKLWLHRIGNTNDESYRAVEERATQIAQILTRYQLMDAQNDKEIDEKFQQALKELITSPIEVTGKLLRKMRFVYDKLNAMQIDRGLVETDKNMLGIHISKGPNEKLIFRRMDVNNAHELQKERSGILCYLNEMLFIFNKKGLIHYGCLRSYLEKGQGSKYIALFNPRFPANPKAQPSKFTSDSKIKQVGIGSATGIIKAHLDLDGHVRSYEVFGTLPEGSIEWFKEESGYGRVEDDPHH

SEQ ID NO: 205 - protein, 1327 aa, Solobacterium moorei
MEGQMKNNGNNLQQGNYYLGLDVGTSSVGWAVTDTDYNVLKFRGKSMWGARLFDEASTAEERRTHRGNRRRLARRKYRLLLLEQLFEKEIRKIDDNFFVRLHESNLWADDKSKPSKFLLFNDTNFTDKDYLKKYPTIYHLRSDLIHNSTEHDIRLVFLALHHLIKYRGHFIYDNSANGDVKTLDEAVSDFEEYLNENDIEFNIENKKEFINVLSDKHLTKKEKKISLKKLYGDITDSENINISVLIEMLSGSSISLSNLFKDIEFDGKQNLSLDSDIEETLNDVVDILGDNIDLLIHAKEVYDIAVLTSSLGKHKYLCDAKVELFEKNKKDLMILKKYIKKNHPEDYKKIFSSPTEKKNYAAYSQTNSKNVCSQEEFCLFIKPYIRDMVKSENEDEVRIAKEVEDKSFLTKLKGTNNSVVPYQIHERELNQILKNIVAYLPFMNDEQEDISVVDKIKLIFKFKIPYYVGPLNTKSTRSWVYRSDEKIYPWNFSNVIDLDKTAHEFMNRLIGRCTYTNDPVLPMDSLLYSKYNVLNEINPIKVNGKAIPVEVKQAIYTDLFENSKKKVTRKSIYIYLLKNGYIEKEDIVSGIDIEIKSKLKSHHDFTQIVQENKCTPEEIERIIKGILVYSDDKSMLRRWLKNNIKGLSENDVKYLAKLNYKEWGRLSKTLLTDIYTINPEDGEACSILDIMWNTNATLMEILSNEKYQFKQNIENYKAENYDEKQNLHEELDDMYISPAARRSIWQALRIVDEIVDIKKSAPKKIFIEMAREKKSAMKKKRTESRKDTLLELYKSCKSQADGFYDEELFEKLSNESNSRLRRDQLYLYYTQMGRSMYTGKRIDFDKLINDKNTYDIDHIYPRSKIKDDSITNRVLVEKDINGEKTDIYPISEDIRQKMQPFWKILKEKGLINEEKYKRLTRNYELTDEELSSFVARQLVETQQSTKALATLLKKEYPSAKIVYSKAGNVSEFRNRKDKELPKFREINDLHHAKDAYLNIVVGNVYDTKFTEKFFNNIRNENYSLKRVFDFSVPGAWDAKGSTFNTIKKYMAKNNPIIAFAPYEVKGELFDQQIVPKGKGQFPIKQGKDIEKYGGYNKLSSAFLFAVEYKGKKARERSLETVYIKDVELYLQDPIKYCESVLGLKEPQIIKPKILMGSLFSINNKKLVVTGRSGKQYVCHHIYQLSINDEDSQYLKNIAKYLQEEPDGNIERQNILNITSVNNIKLFDVLCTKFNSNTYEIILNSLKNDVNEGREKFSELDILEQCNILLQLLKAFKCNRESSNLEKLNNKKQAGVIVIPHLFTKCSVFKVIHQSITGLFEKEMDLLK

SEQ ID NO: 206 - protein, 738 aa, Treponema phagedenis
MLQELFAKEIAKIDEGFFRRLDESAFYLEDKSLKQKYSLFNDDNFTDKDYYKKFPTIHHLIKALINDETHVDIRLLYLACHTIIKNRGHFLFEGKEFNTESRFDDAINELFSYLRQDMEIDFAFEDKIADIKEILENKKIGMRDKQNALNKKLSIAPKDKQKKEIIKLIVGASFNLKTLFNDEKYSSEKESYSFAKSNYEEKEAVLESLLGDGFGLILRAKAVYDSSVLSEILGNETYLSFAKVKIYDKHKEDLAKLKKVIKTYHADEFKKVFAEANIQGNYCSYVGSCKKNGKKVPIEKRADKDAFYDFLKKILKDEKAKNSDADYAFILNEIELKTFLPKQVSKKNANIPYQLRRMELEKIVNNAEKYFSFLSEKDEYGTVKEKIIQLLTFKRPYYIGIIQDTHKEKFPDRCWVVKKENAKNEKITPWNFYDHIDEDKTAEAFITSRTNKCTYLIGEDVLPRNSLLYMEYTVLNELNNLKVSVDGVNIFDVKLKKKIYEQVFKQRKEVSKKTIADFLKKEGICKKENDVVITGIDEKCTTSLKLYIDIKKIIGKRIEEEPTKNALEDIILWASIYDEGEGRKILEAKIQSVYPDVFTQDELNKILKLKISGWGRFSRKFLESIVASFPGFTDTINIITAMRETNFNLMELLGDAYGFSKGIEKFNSKFNDDKKVFSYDKLVKDLYLSPSVKRMLWRALVIVKEVKSIMGKDPKKYLLKWQEEKKLKREGLPPAMQV

SEQ ID NO: 207 - protein, 1377 aa, Streptococcus equinus
MEKTYSIGLDIGTNSVGWAVITDDYKVPAKKMKVLGNTDKKYIKKNLLGALLFDSGETAEATRLKRAARRRYTRRKNRLRYLQEIFAKEMAKVDESFFQRLEESFLTDDDKTFDSHPIFGNKAEEDTYHQEFPTIYHLRKHLADSPEKVDLRLVYLALAHMIKFRGHFLIEGQLNAENTDVQKIFADFVGVYDRTFDDSHLSEITVDAASILTEKISKSRRLENLIKQYPTEKKNTLFGNLVALALGLQPNFKTNFKLSEDAKLQFSKDTYDEDLEELLGKIGDDYADLFTAAKNLYDAILLSGILTVDDNSTKAPLSASMIKRYEEHHEDLEKLKTFIKVNNFDKYHEIFKDKSKNGYAGYIENGVKQDIFYKHLKSIISEKNGGQYFLDKIEREDFLRKQRTFDNGSIPYQIHLQEMRTILRRQGEYYPFLKENQAKIEKILTFRIPYYVGPLARKNSRFAWAKYHSDEPITPWNFDEVVDKEKSAEKFITRMTLNDLYLPEEKVLPKHSYVYETFAVYNELTKIKYVNEQGKSFFFDANMKQEIFDHVFKENRKVTKAKLLSYLNNEFEEFRINDLIGLDKDSKSFNASLGTYHDLKKILDKSFLDDKTNEQIIEDIVLTLTLFEDRDMIHERLQKYSDIFTSQQLKKLERRHYTGWGRLSYKLINGIRNKENNKTILDFLIDDGDANRNFMQLINDDSLSFKTTIQEAQVVGDVDDIEAVVHDLPGSPAIKKGILQSVKIVDELVKVMGHNPQNIVIEMARENQITGYGRNRSNQRLKRLQDSLKEFGSDILSKKKPSYVDSKVENSHLQNDRLFLYYIQNGKDMYTGEELDIDHLSDYDIDHIIPQAFIKDNSIDNRVLTSSAKNRGKSDDVPSIEIVRNRKSYWYKLYKSGLISKRKFDNLTKAERGGLTETDKAGFIKRQLVETRQITKHVAQILDARFNTKCDENDKVIRDVKVITLKSSLVSQFRKEFKFYKVREINDYHHAHDAYLNAVVGTALLKKYPKLAPEFVYGEYKKYDVRKLVAKSSDNHSELGKATAKYFFYSNLMNFFKTEVKYADGRVFERPDIETNADGEVVWNKQRDFNIVRKVLSYPQVNIVKKVEVQTGGFSKESILPKGDSDKLIPRKTKKLQWETQKYGGFDSPTVAYSVLVVADVEKGKTRKLKTVKELVGISIMERSSFEENPVSFLEKKGYHNVQEDKLIKLPKYSLFEFEGGRRRLLASATELQKGNEVVLPQYMVNLLYHSQHVNNSHKPEHLNYVKQHKDEFKDIFNLIISIARINILKPKVVDNLINEFTEYGQEDISSLSESFINLLKFISFGAPGAFKFLKLDVKQSNLRYKSTTEALSATLIHQSVTGLYETRIDLSKLGEE

SEQ ID NO: 208 - protein, 1128 aa, Streptococcus vestibularis
MSDLVLGLDIGIGSVGVGILNKVTGEIIHKNSRIFPAAQAENNVERRTNRQGRRLTRRKKHRRVRLNHLFEESGLITDFTKVSINLNPYQLRVKGLIDELSNEELFIALKNMVKHRGISYLDDASDDGNSSVGDYAQIVKENSKQLETKTPGQIQLERYQKYGQLRGDFTVEEDGKKHRLINVFPTSAYRSEALRILQTQKEFNPQITDEFINRYLEILTGKRKYYHGPGNEKSRTDYGRYTTKKDSENEYITLDNIFGILIGKCTFYPEEYRAAKASYTAQEFNLLNDLNNLTVPTETKKLSEEQKNQIINYVKNEKAMGPAKLFKYIAKLLSCDVADIKGYRIDKSDKAEIHTFEAYRKMKTLETIDFEKMSRDQLDKLAYVLTLNTEREGIQEALDHEFADGNFSQEQIDELVQFRKANSSIFGKGWHNFSVKLMMELIPELYATSEEQMTILTRLGKQKTTSSSNKTKYIDEKLLTEEIYNPVVAKSVRQAIKIVNAAIKEYGDFDNIVIEMARETNEDDEKKAIQKIQKANKDEKDAAMLKAANQYNGRAELPHSVFHGHKQLATKIRLWHQQGERCLYTGKTISIHDLINNPNQFEIDHILPLSITFDDSLANKVLVYATANQEKGQRTPYQALDSMDDAWSFRELKAFVRESKSLSNKKKEYLLTEEDISRFDVRKKFIERNLVDTRYASRVVLNALQEHFRAHKTDTKVSVVRGQFTSQLRRHWGIEKTRDTYHHHAVDALIIAASSQLNLWKKQKNTLVNYSENQLLDIETGELISDDEYKESVFKAPYQHFVDTLKSKEFEDSILFSYQVDSKFNRKISDATIYATRQAKVGKDKKDETYVLGKIKDIYSQTGYDAFIKIYQKDKSKFLMYRHDPQTFEKVIEPILENYPNKEMNEKGKEVPCNPFLKYKEEHGDYIRKYSKKGNGPEIKSLKYYDSKLGNHIDITPKDSNNKVVLQSVSPWRADVYFNKTTGKYEILGLKYADLQFEKGTGTYKISQEKYNVIKKKEGVDSDSEFKFTLYKNDLLLIKDTETKEQQLFRFLSRTKPNVKHYVELKPYDKQKFEGNESLINVLGAVAKGGQCQKGINKPNISIYKVRTDVLGNQHIIKNEGDKPKLDF

SEQ ID NO: 209 - protein, 1080 aa, Methylocystis sp.
MRVLGLDGGIASIGWALIEIFEDHEPSDGRIIDTGAWMFDAPEEKSQTGTKLKSELRRIFRGQRRVIRRRRQRMNEVRRILHRHGLLSSDNRDALKQPGLDPWKIRAEGIDRLLSPIEFAVALGHIARHRGFKSNSKGAKTSDLDAESSRMKKAVGETREKLARFGSPAKLLVEDEGFVLRQTKLKSGALETVRRFRNRDGDYSRSLLRDDLAAEVRALFRAQARLQSTFAKVELEAEFTQAAFFQRPLQDSERLVGPCPFEPAEKRSPKRGYSFELFRFLSRLNHLTLREGSEERTLTVEELRTAAADFGGVAKFTFSTLRKRLALPDIAIFVGIKADDEKKLDVVARSGEAATGTARLRRVVIDALGELAWGALISAPERLDKITEIITFRSDLDRIRAGLIEAGFDTPLIEAIVRAAADGKLDAFTGVGHISAKAARNIIPGLMRGMTYDKACAAAGYDHTASRERDAFDVGMHGKEALKKILQEERISRELVGSPSARKALIEAVKQVKAIIEKYGVPDRIHVELARDVGKSIEERRDIHFGIEKRSRQKDKLRELFGKEVGHLPQDGERGKEELLRFELWNEQMGRCLYTDEYINPKQLVASDNSVQVDHILPWSRFGDDSYLNKTLCTAKANQDKKGRTPYEWFRADKPEAEWDAFVARVESIQFMKGLKKRNYKLKNAEEAAEKFRSRNLNDTRWTCRLLAEALKQLYPKGEKDKDGKERRRVFTRPGALTNRLRRAWSLQRRKKSEKGERIADDRHHALDAIIVAATTESLLIRATREVQDIERKGLHYDLTKNITQPWPGFADEALDAVEKVFVARAERRRARGKAHDATIRHIAVRDDEAKVYERKKVGDIKLGDLIRVKDAERNAPLIENLRKWIEAGSPRDNPPLSPKGDPVSKVRLVTKNKVNITLDTGNPERLATVDRGEMARVDVFRKANRKGKYEYYLVPIYPHEIATMETPPMRAVQGGGDDDKWPEIDSTFEFLWSINQLSLLELTKPDGEVIRSYFRSLDRNTGALTVSGIANSTATRKGIGTRTLIDFKKLHVDRLGQIFEVERELRTWRGETWRGKDCI

SEQ ID NO: 210 - protein, 1087 aa, Phascolarctobacterium succinatutens
MLRMKYAIGLDIGIASVGYAVLALDHEENPWGIIRLGSRIFDVAENPKDGASLALPRREARSVRRRLRRHHHRLERIKNLLINTEFITKDELLHLYDGNLSDVYELRVKALDYSVTNAELTRILLHLAQRRGFKSNRKSDANDKEAGQLLEAVSANAKRMQENHYRTVGEMFYKDDLFSKYKRNKGGTYLTTVHRDMIAAEARTILEKQFALGNNICTQDFIDKYLSILLSQRQFDEGPGEPSPYAGNQIANMIGKCTFEPNEYRAAKASYSFERFNLLQKVNHLRLLLEGKSIALDNEQRKKIIALAHDKADLRYSHIRKALGLDEKVLFNTITYNDDVSVIEKKTKFNFLQAYHQIKKVLAEDMQKLTTEQLDNIGQILSTYKSDNKRTEELSALGLEKKIIDALLGINGLSKFAHLSLKALRKINPYLEEGKIYNEACTAAGYDFKAHANTQKTELLPAYKEEMDDITSPVARRAIAQSIKVINAIIREQKGSPLYINIELAREMAKGFDERTQIDKANKENQAKNERIMERIRTEFHKANPTGMDLIKLKLWEEQDGRSPYSQKAISINRLFEPGYVDIDHIVPYSISFDDSFKNKVLVFSDENRDKGNRLPIAYLQSKFGAKAAENFMIWVQSNIKDYKKRQKLLKREITEEDINKFKERNLQDTKTISRFLYNYINDYLLFAPSDTGKKKRVTAVNGTITAYLRKRWGINKIRANGDKHHAVDAVVIACTTDKMIKDLSSFSRYHELEYTHTDTESFLVNSLTGEILKRFPYPWEDFRPELMARLSDNPADALRKLNLIFYHGIDLSTIKPIFVSRMPRHKVTGAAHKATIKSARCLDNGIVICKTSLQNLKLDKEGEIANYYAPESDTILYNALKERLRSYDNKPAKAFAEPFYKPKADGTPGPLVKKVKVYEKSTLNVAVQQNTAVADNDSMVRVDVFHVKGNGYYLVPIYIADTLKKELPNKAIVAYKPYADWPVMDDSNFIFSLYPNDLIKFEHKNSVKFAKVNKESTLNDFYSTKSEIVYFKGCNINTGAITIINHENTYVVSSLGVKTLPSLEKYQADVLGNYTKVKKEVRKPFR

SEQ ID NO: 211 - protein, 1375 aa, Lactobacillus ruminis
MRKNQEPYNIGLDIGTSSIGWSIMNDNFDLMRVKGKKGIGVRLYNEGQSAAERRMHRTARRRYGRRKWRLRLLEDFFDEHMAEVDDTFFARLKDSNISPKDDKKYRKSLLFPKSKGVTYQDDGEFYKKYPTMYHLRYALMTEHRKFDLREIYLAFHHMVKYRGNFLYDTSVDSFEAKNLDIKGKFDEINDLLSSYTDFYVDNSNAALVESILLEKNTTRKDKSKKIAKLLHVEDKEKGKNKKAKDLATQISNAVLGLKCNFHLIFELQQKYSFDLCSEKTEENIAKLSEVLDENQKMLLMILKEVQDQVMLNAFVPSGMSLSEAMMQKYDDYGEQLKIYHELEHSVSDDSAAKLRGAYRDYNDNIIKRIDGDNKKDTFYKRVKNILTKISKEYVDQDVLESCGKLKKLIDENKLFIRQRTAANGVLPHQLHQIEMRKIIDNQKEYYPWLAEPNPNEKRRVYSKYKVEELIAFRIPYYVGPLVDPNNADKNKEARFSWMVRKKDGEITPWNFYDKVDWAESANNFIERMKSKDTYLLGEDVVPKESMLYQKYEVLNELNNLRINDSGLSDSFEDVKLKQAIYNDLFKKQKIVKITDLQNYLVQNHKYLVKPKISGLADENRFLSSLSTYSDLKTIFGDKVDDRTYFNDFEKMVEYSTVFEDGHDYNQKLDEYTWLTKEEKYKIGKKRYRGWGKLSKKLLTGLRDKNNHTIMDNLWETNRNFMQIQTADEFSKQIAEENERHLKGSVSDAINDMYTSPANKKAIRQVLRVVDDIQKAMGYAPSSISLEFAREDGPSVRTVSRANRMKSIYEKYASEVSEEVMKDLDGVIKDKKGLNDRLYLYFEQQGKDMYSGHPLDFDKVISGQEYDIDHILPQAVIKDDSLDNRVLTTKALNNDVKSKGVPCRMFNGMHSFWKNLYDKGFISRRKFNNLTTNPENIDKYKMKGFVNRQLVETRQIIKLVANVLNDKYQNDDVDIIEVRAELTHDVRKHFKFYKNRNVNDYHHAFDAYLTSFIGHYLFKKYPNLRPLFDYNDFMKVSDNVFKQLRGNNFLGEFLNKTGDIISTDGNFVLNKEEMINKLNKAYAFKKILVTKEVGQRTGAMFNETRYPAPNSRKAALKYRRMPKPDSLISVKDYKNTDIYGGYSGKNDAYMVIVDMGKQYMVVGVPVRYTEKLDKLRIKHSELYRDELRKVLSRDKTLLDSKGNVKRFDIVLDRVLYGQLIEDGNELFTLGSSKYKRNFRQLFLDKQCIEILDSSATPQPTDEELIWVYDQILDKVDKYFELYDINRQRETLRKGRAAFCSLPNISMKKDDVTKKKILNEILVALHANESESNCEKIGKKVFGRLQVPGGIKLSKEAKLIYQSPTGLFERVVYLKDL

SEQ ID NO: 212 - protein, 1391 aa, Prevotella oralis
MKKILGLDLGTTSIGWALVNEKENNEELSSIIRLGVRVNPLTVDEKSNFEKGKDITTNADRTKCRSARRNLQRFKLRREALADCLKRHGLMTDETPLCETNNSIIFKTYSNRAKAVCEKIALDDFVRVLFMINKKRGYKSSRKLNTDDEGTLVDGMDVAKLLYNEQITPGEYLLRLFKKGKKTRPDFYLSDLKAELERIWDFQRTFYPEILCNALKEDLKGKSRTQSSAIFYAKYKVSTAKIAGKDKRLQELTWRTDALRKQLTIDEVAYVICSINGEVNGSSQRLSMISDRSKLLYFNHQTIGQYLMQRLEENPNAGLKNIIFYRQDYEDEFNDIWNSQATYHKELTPELKKEVKDIIFYQRGLKSCKWLINYCELEHEEIEVKTPEGKLRKITIGSKTCPKSSPLFQEFKIWQVLNNLQVSPLNSRRKAKRKKDEEPSLFSDEDMNTACRYLNEEEKLTLFKELSIKKELKKKDALKLLFENYKELDLNYKVISGNVTMANLYRAFQDIISLTGNGEFDFQAMPAEEAEKTVEEIFGGLGYKTAFLHFDASLHDKEFERQPAYRLWHLLYSYAGDQSKTGIEALVKRIQELCGFEPEYARILANISFIPDYGNLSSKAMRKILPYMQDGYEYSEACSKAGYRHSASSLTKEEINKKNYKTHLDEIKRNSLRNPIVEKILNQMVNVVNSVIDTYSNIDEIRIEMARELKKSKPEREDMSFAISKATKETERIKGILEQEFKIQHVTRNDIIRYRLYEELKPNGYKTLYSNTYIPREDLFSKKFDIEHIIPKARLFDDSYSNKTLELRDINIEKGNQTAYDFVLSKYGEEGLYKYEQRVEEFKKNNEQAGTKCRKLLMREADIPSDFLNRDLNDSQYIAKKAHELLREIVPTVTATTGSITNRLREDWKLVNVMKELNWEKYDKLGLTEEYKDKDGNTVRHIKDWTKRNDHRHHAMDALTIAFTKPSFIQYLNNLNARSNRGGSIYGIEQKELERENNKLVFIPPIDPKIFRKQAKEHLSNILISIKAKNKVVTKNVNKTKSKSGTNRKVQLTPRGQLHLETVYGKIRTYKTEEIKVGTKLTEELIAKVADKKIREALMQRLSEYGGNIKKAFQNISKHPIWLNGSHTKHVPEKVKIVFFEDVFTIRKAITPDIKIDKVIDSKIRRILQERLNEFGGEASKAFSNLDENPIWFNRDKGIAIKSVKIRGIAKGTAIRVKKDIHGKTIIGNNGYPVANDYVNTGNNHHVAIFRDKDGNLQEHIVSFYEATARAIQNLPIVDRNYNSEKDWKFLFSMKQNEYFVFPNPNTGFNPSEISLKDEKNYALISPNLFRVQKLSHYYYVFRHHLETNVDTNLQLKDITWKRITAVNNLTGAVKVRIDHLGRIVDVGEYK

SEQ ID NO: 213 - protein, 1167 aa, Streptococcus sanguinis
MLFGLKTKFKDCFELEEEPDLNFSKENYDDNLEKLLGELGEDFSDVFDKLKILRDTILLSGMLTYTGATHARFSATMVERYEEHRKDLQRFKSFIKQNLSEQDYLDIFGRKTQNGFDVDKETKGYVGYITNKMVLTNPQKQKTIQQNFYDYISGKITGIEGSEYFLNKISDRTFLRKLRTSDNGAIPNQIHAYELEKIIERQGKDYPFLLENKDKLLSILTFKIPYYVGPLAKGNNSRFAWIKRANSSDILDDNDEDTRNGKIRPWNYHKLINMDETRDAFITNLIGNDTILLNEKVLPKRSLIYEEVMLQNELTRVKYKDKYGKAHFFDSEHRQNIINGLFKINSKRVNAERLIKYLSDNHKDLNAIEIVSGVEKGKSFNSTLKTYNDFKTIFSEEFLDSEIYQKELEEIIKVITVFDDKKSIKNYLTKYFGHLEFLDEEKINQLSKLRYTGWGRYSAKLLLDIRDEDTGFNLLQFLRNDEENRNLTNLISDNTLSFDPKIKAIQSKSTVEDDVFDEIKKLAGSPAIKRGILNSIKIVDELVQIIGYPPQNIVIEMARENMTTEEGQKKTKTRKSKLESALKNIENSVLENGKVLHSDEQLQSEKLYLYYLQNGKDIYSLDETGSPAPIYLDQLDQYEVDHIIPYSFLPIDSIDNKVLTHRKNNQRKLDNIPDKETVAHMKPFWEALYNAKLISQTKYQRLTTSERTPDGVLTESMKAGFIERQLVETRQIIKHVARILDNRFSDTKIITLKSQLVTNFRNTFHIAKIRELNDYHHAHDAYLAVVVGQTLLKAYPKLAPELIYGHHVHFNRHEENKATLRKHLYSNIMRFFNNPDSKVSKDIWDCNRDLPIIKHVIYNSQINFVKRTMIKKGAFYNQNPVGKFNKQLAANNRYPLKTKALCLDTSIYGGYGPMNSTLSIIIIAERFNEKKGKIETVKEFHDIFIIDYEKFNNNPFQFLNDTSENGFLKKNNINRVLGFYRIPKYSLMQKIDGTRMLFESKLNLHKATQFKLTKTQNELFFHMKRLLTNSNLMDLKSESAIKESQNFILKHKEEFDNISNQLSAFSQKMLGNTTSLKNLIKGYNERKIKEIDIREETIKYFYDNFIKMFSFVKSGAPKDINDFFDNKYTVARMRPKPDKRLLNATLIHQSITGLYETRIDLSKLGED

SEQ ID NO: 214 - protein, 1334 aa, Staphylococcus pseudintermedius
MGRKPYILSLDIGTGSVGYACMDKGFNVLKYHDKDALGVYLFDGALTAQERRQFRTSRRRKNRRIKRLGLLQELLAPLVQNPNFYQFQRQFAWKNDNMDFKNKSLSEVLSFLGYESKKYPTIYHLQEALLLKDEKFDPELIYMALYHLVKYRGHFLFDHLKIENLTNNDNMHDFVELIETYENLNNIKLNLDYEKTKVIYEILKDNEMTKNDRAKRVKNMEKKLEQFSIMLLGLKFNEGKLFNHADNAEELKGANQSHTFADNYEENLTPFLTVEQSEFIERANKIYLSLTLQDILKGKKSMAMSKVAAYDKFRNELKQVKDIVYKADSTRTQFKKIFVSSKKSLKQYDATPNDQTFSSLCLFDQYLIRPKKQYSLLIKELKKIIPQDSELYFEAENDTLLKVLNTTDNASIPMQINLYEAETILRNQQKYHAEITDEMIEKVLSLIQFRIPYYVGPLVNDHTASKFGWMERKSNESIKPWNFDEVVDRSKSATQFIRRMTNKCSYLINEDVLPKNSLLYQEMEVLNELNATQIRLQTDPKNRKYRMMPQIKLFAVEHIFKKYKTVSHSKFLEIMLNSNHRENFMNHGEKLSIFGTQDDKKFASKLSSYQDMTKIFGDIEGKRAQIEEIIQWITIFEDKKILVQKLKECYPELTSKQINQLKKLNYSGWGRLSEKLLTHAYQGHSIIELLRHSDENFMEILTNDVYGFQNFIKEENQVQSNKIQHQDIANLTTSPALKKGIWSTIKLVRELTSIFGEPEKIIMEFATEDQQKGKKQKSRKQLWDDNIKKNKLKSVDEYKYIIDVANKLNNEQLQQEKLWLYLSQNGKCMYSGQSIDLDALLSPNATKHYEVDHIFPRSFIKDDSIDNKVLVIKKMNQTKGDQVPLQFIQQPYERIAYWKSLNKAGLISDSKLHKLMKPEFTAMDKEGFIQRQLVETRQISVHVRDFLKEEYPNTKVIPMKAKMVSEFRKKFDIPKIRQMNDAHHAIDAYLNGVVYHGAQLAYPNVDLFDFNFKWEKVREKWKALGEFNTKQKSRELFFFKKLEKMEVSQGERLISKIKLDMNHFKINYSRKLANIPQQFYNQTAVSPKTAELKYESNKSNEVVYKGLTPYQTYVVAIKSVNKKGKEKMEYQMIDHYVFDFYKFQNGNEKELALYLAQRENKDEVLDAQIVYSLNKGDLLYINNHPCYFVSRKEVINAKQFELTVEQQLSLYNVMNNKETNVEKLLIEYDFIAEKVINEYHHYLNSKLKEKRVRTFFSESNQTHEDFIKALDELFKVVTASATRSDKIGSRKNSMTHRAFLGKGKDVKIAYTSISGLKTTKPKSLFKLAESRNEL

SEQ ID NO: 215 - protein, 1156 aa, Ruminococcus albus
MGNYYLGLDVGIGSIGWAVINIEKKRIEDFNVRIFKSGEIQEKNRNSRASQQCRRSRGLRRLYRRKSHRKLRLKNYLSIIGLTTSEKIDYYYETADNNVIQLRNKGLSEKLTPEEIAACLIHICNNRGYKDFYEVNVEDIEDPDERNEYKEEHDSIVLISNLMNEGGYCTPAEMICNCREFDEPNSVYRKFHNSAASKNHYLITRHMLVKEVDLILENQSKYYGILDDKTIAKIKDIIFAQRDFEIGPGKNERFRRFTGYLDSIGKCQFFKDQERGSRFTVIADIYAFVNVLSQYTYTNNRGESVFDTSFANDLINSALKNGSMDKRELKAIAKSYHIDISDKNSDTSLTKCFKYIKVVKPLFEKYGYDWDKLIENYTDTDNNVLNRIGIVLSQAQTPKRRREKLKALNIGLDDGLINELTKLKLSGTANVSYKYMQGSIEAFCEGDLYGKYQAKFNKEIPDIDENAKPQKLPPFKNEDDCEFFKNPVVFRSINETRKLINAIIDKYGYPAAVNIETADELNKTFEDRAIDTKRNNDNQKENDRIVKEIIECIKCDEVHARHLIEKYKLWEAQEGKCLYSGETITKEDMLRDKDKLFEVDHIVPYSLILDNTINNKALVYAEENQKKGQRTPLMYMNEAQAADYRVRVNTMFKSKKCSKKKYQYLMLPDLNDQELLGGWRSRNLNDTRYICKYLVNYLRKNLRFDRSYESSDEDDLKIRDHYRVFPVKSRFTSMFRRWWLNEKTWGRYDKAELKKLTYLDHAADAIIIANCRPEYVVLAGEKLKLNKMYHQAGKRITPEYEQSKKACIDNLYKLFRMDRRTAEKLLSGHGRLTPIIPNLSEEVDKRLWDKNIYEQFWKDDKDKKSCEELYRENVASLYKGDPKFASSLSMPVISLKPDHKYRGTITGEEAIRVKEIDGKLIKLKRKSISEITAESINSIYTDDKILIDSLKTIFEQADYKDVGDYLKKTNQHFFTTSSGKRVNKVTVIEKVPSRWLRKEIDDNNFSLLNDSSYYCIELYKDSKGDNNLQGIAMSDIVHDRKTKKLYLKPDFNYPDDYYTHVMYIFPGDYLRIKSTSKKSGEQLKFEGYFISVKNVNENSFRFISDNKPCAKDKRVSITKKDIVIKLAVDLMGKVQGENNGKGISCGEPLSLLKEKN

SEQ ID NO: 216 - protein, 1440 aa, Weeksella virosa
MKTILGLDLGTNSIGWALVEQDFENKQGLILGMGSRIIPMDAGIIGKFAEGSSISQTAERTGYRSIRRLRERHLLRRERLHRVLNILKFLPEHYAAEIDFEKRFGQFLAETEPKLAWKKNAEGKFEFLFQRSFDEMVADFKANGQDIKIPYDWTIYYLRKKALTQKISPQELAWIILNFNQKRGYYQLRGEEEEENPNKKVEFYSLKIVDVVADEQPNKKGDTWYSLHLENGWVYRRSSKIPLYDWKDKVRDFIVTTDINEDGSEKLDKDGEVKRSFRAPKEDDWTLIKKKTEQEIEQFNQTVGSYIYEALLDNPTQKIRGKLVRTIERKFYKSELKKILEKQIELQPELFTEDLYNACARELYRRNVAHQQQLSSRDFVYLFLNDIIFYQRPLRSQKSLISNCSLEFRTIKDKDGNGQIIYLKAIPKSNPYYQEFRVWQWLYNLKIFTKEDDKDVTNQFINKVEDLEALFEFLMNQKEVNHTDILTYLIEPIVKSKYPNAKGKAFKDELKKELKKYRWNYVYDADKDESKSYPMNETRYELRKRLDKVENVPADFMTRKIEQHLWHIIYSVTDKIEFEKALKSFANKYDLHQESFVENFKRFKPFDSDYGTYSEKAIKKLLPLMRVGKYWSWDIIDDKTKTRIGKIITGEYDETIKNRVREKAIDLTEENHFQGLQLWLAQYIVYDRHSEADIAGKWNSVADLEQYLSEFKQHSLRNPIVEQVITETLRVVRDIWKQYGKGAKDYFDEIHIELGREMKNTAEERKRLSSIISENETTNLRIRAILEELMYDENMENVRPYSPMQQEALKIYEDGVLSSSVEIPEDIEKISKKSEPTKSEIQRYKLWLEQKYRSPYTGRPIPLSKLFTPAYQIEHIIPQARFFDDGFSNKVICESEVNALKDKMLGLEFIQNYYGQKVTTSFGEVTILTEDAYKAFVKEHYDKNRSKRNKLLLEEIPEKMIDRQMNDTRYISKYISKVLSNLVRGEKDDEGVNSKNIIPGNGKITGILKQDWGLNDVWNDLILPRFERMNQLTNSTDFTAWNEKHQKFLPSVPLELSKGFQKKRIDHRHHALDALIIACATRDHVNLLNNKHAKSRNERYDLQHKLRHTTPWQDKEGKVRTKFTEFKKPWETFTQDTKKELEKIVVNFKQNLRVINKATNYYEKIVDGKKVMFKQEGVNWAIRKPMHKETVSGKIDLPRVKVSKGKILTATRKSLDTSFNAKTILSITDTGIQKILLNYLKAKGNPELAFSPEGIEEMNQNISLYNDGKPHQPILKVRVFEQGSKFPLGETGNKTTKYVEAAKGTNLFFGVYEDNQGKRSYDTIPLNIVIERQKQGLNSVPETNEKGHRLLFSLSPNDLVYVPIEGEVFDETNPDVNRIYKVVSFSGSQMFCVRQDVATSIVYKLEFSSLNKMERTIDGIMIKEICIKLKVDRLGNISKA

SEQ ID NO: 217 - protein, 1179 aa, Sphaerochaeta globus
MSKKVSRRYEEQAQEICQRLGSRPYSIGLDLGVGSIGVAVAAYDPIKKQPSDLVFVSSRIFIPSTGAAERRQKRGQRNSLRHRANRLKFLWKLLAERNLMLSYSEQDVPDPARLRFEDAVVRANPYELRLKGLNEQLTLSELGYALYHIANHRGSSSVRTFLDEEKSSDDKKLEEQQAMTEQLAKEKGISTFIEVLTAFNTNGLIGYRNSESVKSKGVPVPTRDIISNEIDVLLQTQKQFYQEILSDEYCDRIVSAILFENEKIVPEAGCCPYFPDEKKLPRCHFLNEERRLWEAINNARIKMPMQEGAAKRYQSASFSDEQRHILFHIARSGTDITPKLVQKEFPALKTSIIVLQGKEKAIQKIAGFRFRRLEEKSFWKRLSEEQKDDFFSAWTNTPDDKRLSKYLMKHLLLTENEVVDALKTVSLIGDYGPIGKTATQLLMKHLEDGLTYTEALERGMETGEFQELSVWEQQSLLPYYGQILTGSTQALMGKYWHSAFKEKRDSEGFFKPNTNSDEEKYGRIANPVVHQTLNELRKLMNELITILGAKPQEITVELARELKVGAEKREDIIKQQTKQEKEAVLAYSKYCEPNNLDKRYIERFRLLEDQAFVCPYCLEHISVADIAAGRADVDHIFPRDDTADNSYGNKVVAHRQCNDIKGKRTPYAAFSNTSAWGPIMHYLDETPGMWRKRRKFETNEEEYAKYLQSKGFVSRFESDNSYIAKAAKEYLRCLFNPNNVTAVGSLKGMETSILRKAWNLQGIDDLLGSRHWSKDADTSPTMRKNRDDNRHHGLDAIVALYCSRSLVQMINTMSEQGKRAVEIEAMIPIPGYASEPNLSFEAQRELFRKKILEFMDLHAFVSMKTDNDANGALLKDTVYSILGADTQGEDLVFVVKKKIKDIGVKIGDYEEVASAIRGRITDKQPKWYPMEMKDKIEQLQSKNEAALQKYKESLVQAAAVLEESNRKLIESGKKPIQLSEKTISKKALELVGGYYYLISNNKRTKTFVVKEPSNEVKGFAFDTGSNLCLDFYHDAQGKLCGEIIRKIQAMNPSYKPAYMKQGYSLYVRLYQGDVCELRASDLTEAESNLAKTTHVRLPNAKPGRTFVIIITFTEMGSGYQIYFSNLAKSKKGQDTSFTLTTIKNYDVRKVQLSSAGLVRYVSPLLVDKIEKDEVALCGE

SEQ ID NO: 218 - protein, 1370 aa, Streptococcus gallolyticus
MTKKNYSIGLDIGTNSVGWAVITDDYKVPAKKMKVLGNTDKKYIKKNLLGALLFDSGETAEATRLKRTARRRYTRRKNRLRYLQEIFAEEMTKVDESFFYRLDESFLTTDEKDFERHPIFGNKAEEDAYHQKFPTIYHLRNYLADSSEKADLRLVYLALAHMIKYRGHFLIEGKLNAENTDVQKLFTDFVGVYDRTFDDSHLSEITVDVASTLTEKISKSRRLENLIKYYPTEKKNTLFGNLIALALGLQPNFKMNFKLSEDAKLQFSKDTYEEDLEELLGKIGDDYADLFTSAKNLYDAILLSGILTVDDNSTKAPLSASMIKRYVEHHEDLEKLKEFIKANKSELYHDIFKDKNKNGYAGYIENGVKQDEFYKYLKNTLSKIDGSDYFLDKIEREDFLRKQRTFDNGSIPHQIHLQEMHAILRRQGDYYPFLKEKQDRIEKILTFRIPYYVGPLVRKDSRFAWAEYRSDEKITPWNFDKVIDKEKSAEKFITRMTLNDLYLPEEKVLPKHSHVYETYAVYNELTKIKYVNEQGKESFFDSNMKQEIFDHVFKENRKVTKEKLLNYLNKEFPEYRIKDLIGLDKENKSFNASLGTYHDLKKILDKAFLDDKVNEEVIEDIIKTLTLFEDKDMIHERLQKYSDIFTANQLKKLERRHYTGWGRLSYKLINGIRNKENNKTILDYLIDDGSANRNFMQLINDDTLPFKQIIQKSQVVGDVDDIEAVVHDLPGSPAIKKGILQSVKIVDELVKVMGDNPDNIVIEMARENQTTNRGRSQSQQRLKKLQSSLKELGSNILNEEKPSYIEDKVENSHLQNDQLFLYYIQNGKDMYTGDELDIDHLSDYDIDHIIPQAFIKDDSIDNRVLTSSAKNRGKSDDVPSLDIVRARKAEWVRLYKSGLISKRKFDNLTKAERGGLTEADKAGFIKRQLVETRQITKHVAQILDARFNTEHDENDKVIRDVKVITLKSNLVSQFRKDFEFYKVREINDYHHAHDAYLNAVVGTALLKKYPKLASEFVYGEYKKYDIRKFITNSSDKATAKYFFYSNLMNFFKTKVKYADGTVFERPIIETNADGEIAWNKQIDFEKVRKVLSYPQVNIVKKVETQTGGFSKESILPKGDSDKLIPRKTKKVYWDTKKYGGFDSPTVAYSVFVVADVEKGKAKKLKTVKELVGISIMERSFFEENPVEFLENKGYHNIREDKLIKLPKYSLFEFEGGRRRLLASASELQKGNEMVLPGYLVELLYHAHRADNFNSTEYLNYVSEHKKEFEKVLSCVEDFANLYVDVEKNLSKIRAVADSMDNFSIEEISNSFINLLTLTALGAPADFNFLGEKIPRKRYTSTKECLTATLIHQSITGLYETRIDLSKLGEE

SEQ ID NO: 219 - protein, 1044 aa, Nitrosomonas sp.
MLHKMRYRLALDLGSTSLGWAMVRLNANQQPCAVIKAGVRIFSNGRNPKDGSSLAVTRREARSMRRRRDRLLKRKARMMRTLIEYGFFPANETQRKALENLNPYALRAKGLDEALTPSEFARALFHINQRRGFKSNRKTDKKDSDSGALKTAIKQLHSVLDPQGNDGKPRTVGELLYKRFTDLSKLPKDRTVRARYRQDKIVKDDGKTKIDKYYDLYIDRAMIEQEFDALWKKQSELNPILFTENARADLKDVLLYQRSLKPVKPGRCTFMSEEERAPLALPSTQRFRMYQEVNNLRILREGLKEESLTLQQRDDLINALEKNNRRTFTQIKKLLGVGGSVQFNFEDPKREELKGNTTSAILGKSEHFGEAWFAFNEAKQDAIVLQLIKEENEAKLVRWLQDETGIDEKRAEVIANAGLPEGYGSLCIEALARILPELRRDVVTYDKAVQAAGFEHHSKLNRNEEIPDITFKIESIDRNSGEIKQFHLHKELPYYGEYLQRHVGFGSGKPEDSIEKRYGKIANPTVHIGLNQVRVVVNALIKRYGHPSEIIVEVARDLKQSKDRRDEENKRQAENQKRNERLRKDIADILGISEERVRRDDIEKMILWEELSFDPADRRCPYSGVQVSTVMLLSDEVEVEHILPFSQTLDDSLNNKTVALRQANRIKGNRTPWEAFGTSNISGFDYSGILTRAELMPKAKRYRFAEDGYQRWLKDDAGFLARALNDTRHLSKIAREYMSLICPNTRVIPGQMTAMLRRNFGLNDVLGLNGEKNRNDHRHHAVDACVIAVTDQGLLQRFAAASASARERQLNRLVENMPLPWESYREHVRRAIDGIWVSHRPDHSHEGAMHNDTAYGLRGNGRVSFHKMVEGKREYIEDNLKVIEITDTKAIDRHGLLPTGKPRPYKGYKGDSNYCIEIVRNEKGRWEGEIISTFDAYQLVRKYGIVQLRYPVLSVSGKPLVMRLIRNDFVRLEHEGITRTLRVCKMREDGQVALADVTEANVDARTRTKEICYVFKTGGSLQKAKARRITISPIGELRDPGFKE

SEQ ID NO: 220 - protein, 1045 aa, Acidovorax avenae
MQKEKPLAYRLALDLGSTSLGWAVLRLSAPGEPSAVIRAGSRIFSDGRNPKDGSSLAVTRRAARAMRRRRDRLLKRKARMLAALERHGFFPQDEAARKALEKLNPYGLRARGLESALKPEEFGRALFHLNQRRGFQSNRKTDRKDSDSGALKQAIGTLRAQMHESGCRTVGEWFWKVRMERKPEGVKGQGVRARYRETPFTTDEGKKRIDKRYDLYVDRAMVAQEFDALWAAQATFAPALFNEAARAELRDILLHQRKLRPVQPGRCTLVPEEPRALLALPSTQRFRIYQEVNHLRVLHDELREEALTLAQRDQIVALLERQAKVTFTAMRKALGFSALFNLEDAKRDGLKGNATTAALGKKDLFGPLWAGFDTALQDEIVTQLMTEESEPRLIAWLQEHTGVDEARAQAIANAGLPEGYGSLGRTALARIVPELQRDVITYDKAVQAAGFAHHSDLGFSFEHDADEVERIGERTIASTGEIKPVFAFKQLPYYGRALQRHVAFAKENPRNDEERYGKIANPTVHIGLNQVRVVVNALMCRYGRPTEVVIELARDLKQSREQKLEAQQRQADNQKRNARIRRSIAEVLGISEERVRTLDIQKWILWEELSHDAADRRCPYSGVQISASMLLGERVEIEHILPFSMTLDDSLNNRTVALREANRIKRNRTPWDARTDFEAHGWSYDGILQRAERMPQRKRHRFAPDGYERWLGEDKDFLARALNDTRYLSRVAAEYLRLVCPGSATRVIPGQMTALLRGKFGLNDVLGLDGEKNRNDHRHHAVDACVIGVTDQRMMQRFAQANAQAREDGLTRLVEDMPLPWPTYRAHVERAVRHIWVSHKPDHGFEGAMMEETSYGILRDGTIKQRRKADGSAGREISRLIRITEPSQPQRHGVDAEGRPLPYKGYVGGSNYCLEITVNDKGKWEGQVISTFDAYRIVREGGLRQLRHSTQGQNGQALAMRLVIGDSVRLEVDEQERVMRIVKINGNNGQVFMAPVHEANVDARNSDKNEAFAYTSKIAGSFQKTKARQVTISPIGELRDPGFKG

SEQ ID NO: 221 - protein, 1218 aa, Prevotella denticola
MKASEEKLSKGLSTYMKENNLLTVGAAFAQLEDEGVRIRNNNNYRAIRSQFQHEIETIFMFQQGLSENELYERLVSEKKNIGTIFYKRPLRSQRGNVGKCTLERTKPRCAIGHPLFEKFRAWTLINNIKIRMSEEEQAEQLPMKLRFELYNDCFLAFVRAEFKFEDIRKYLEKRLGVHFSYNDKTINYKDSTSVAGCPITARFRKLLGEDWESFHVDGQKQRQAHGKNNASFHTVSYSTNDIWHFCYDAEEPEAVLSFAQDNLKWEKKKAEELVRIWSAIPQGYAMLSQKAIRNINKMLILGLKYSDAVLLAKVPEIVEITDGEILSVTEDYHRVEAQVGYEKQINNIVNALIAKYKSASEEYRFADHNYEYQLDKSDEKDIIKQIESNIGTRKWSLLDADEQTDILQKVRDKYQNFFRSHERKFVESPKLGECFEEYLMKKFPMVEGEQWKKLYHPSQIAIYRPVSAGKDRSALRLGNPDIGAIKNPTVLRVLNTLRKRVNQLLDDGLISPDETRVVVETARELNDANRKWALDNYNRIRHDENEKIKKILEEFYPKRDGISTDDIDKARYVIDQREMDYFTEEKPYNKDIKKYKLWLEQGGQCMYTGRTINLSNLFDPNSFDVEHTIPESISFDSSDMNLTLCDAHYNRFIKKNHIPADLPNYDKSVVIDGKEYSPIKPRLQRWADRVERLNRNVEYWRGQARRAQNKDRKDQCMREMHLWKMELEYWTKKLERFTITEVTDEFKNSQLVDTRVITRHAVLYLKSIFPHVDVQRGDVTAKFRKILGIQSVDEKKDRSLHSHHAIDATTLTIIPGAAKRERMLELFAKIEEVNKMLSFSGNEDRTGLKQELDGLKNQLNKEVKACRIGHNVSEIGTFINDNIIINHHVKNQALTPVRRRLRKRGHIVGGMDNPRWQTGDALRGEIHKASYYGAITQFAKDKDGKVLLKEGHPLVDPTIKFVIRRELKYKKSTADSGFASWDDLEKAIVDKELFALMKGQFPEETSFKDACEQGIYMIKKGKNGEVDTKLYRIRHIRCKTKQKNALKIKEQAYKSEKEYKRYFYAAVGDLYAMCCYTNGKTREFKIYSLYDISCHRKVGVEDIPEFITDKKGNRLMLDYKLHTGDMILLYKENPEELYDLDNVSLSKLLYKINGFENDGLRIRMVNHLVAKEAMGESVKDYAKLPDIIRCGVKTIKFLVMGENRDFVIKNGKISFNHR

SEQ ID NO: 222 - protein, 1458 aa, Fluviicola taffensis
MTKTILGLDLGTNSIGWALINQDFDNKKGEILGMGSRIIPMTQDIKDEFGKGNSISQTAERTRLRGVRRLIHRTLLRRERLHRVLNIIGFLPEHYANQIDFEKRFGKFKPESEPKISFDGNDVFLFEKSYQEMLVDFKIHQPQLVSNGKKIPHDWTIYYLRKKALSKKIEKEELAWILLNFNQKRGYYQLRGEEEEETPNKLVEFHSLKIVEVNADEPQKGKPEIWYSLVLENGWVYRRASKTPLFDWKDKIREFIVTTEINNDGTVKTDKEGTEKRSFRAPKPEDWTLQKKKTEFELSKSGNEVGAFIYESILQKPNQKIRGKLISTIERKFYKEELKTILKTQLFFHKELKDEKLYNACIEELYKNNEAHRSLLSNKGFEHLFINDILFYQRPLRSKKSQISNCPLEKRTYKKEGIEITEGIKVISKSNPIYQEFRLWQWISNLSLYCIEPTETNVTSTFLNSIEDYENLFEFLNNRKEIEQKHLLKYLLENQGFKGKLLTNELEKFRWNFVADKKYPCNETGSLLHTRLSKVKNISPDFLTKEIEHQLWHIIYSVTDKIEYEQALKTFARKNNLDVDSFFEHFKKIPPFESTYGAYSEKAIKKLLPLIRLGKYWNWEAIDSISKDRISKILSGEYDENIKNRVREKAVHLTSENNFQGLQEWLAKYIVYDRHSEGNDLGKWTSVSDLETYLKEFKQHSLRNPIVEQVITETLRVVKDIWIKHGKGTENFFDEIHVELGREMKNNSEDRKRLTNTITENENTNLRIKALLMEMMNDNDVENVRPYSPSQQEILKIYEDGALNSNIELDDEIVKISKKAEPTKSELQRYKLWLEQKYRSPYTGQVIPLNKLFTSEYEIEHVVPQSRFFDDSFSNKVICESAVNKRKDNQLGLQFIKNHSGEKVELGFGKVVQVFTEEQYLDFVKEHYSKNRSKHNKLLLEEIPEKMIERQLNDTRYISKFVSSILSNIVRSEKDDDGLNSKNILPGNGKITTELKRDWGLNDVWNDLILPRFERMNTITNSDLFTTYNDKYQKHLPTVPFEYSKGFQKKRIDHRHHAMDALVIACATRDHLNLMNNQSAKSELKRYDLQNKLRKKEPYFNQKENKQKEAFKDFIKPWGTFTEDSKNALEKIIISFKQNLRVINKATNSYESYKDEDGNLRIGKDGKPEKGLIKQKGLNWAIRKPLHKDTVSGQINLSRIKLPNGKILTATRKNLDTSFDLKTIENSITDTGIQKILKNYLLSKESPELAFSPEGLEEMNNEIEKYNNGKFHHPINKARIYELGSKFNVGQTGNRRDKFVEAAKGTNLFFAIYQDENKNRSYETIPLNEVIEHQKWRASLPKEEQEKIPLVPVNKLKGTFIFSLSPNDLVYVPSNDELERSASIDFSKLKKEQINRLYKMVSSSGSQCFFVKSEVATSVVNKMEYSSLNKMEKSIDNLMVKEICIKLKIDRLGNISKA

SEQ ID NO: 223 - protein, 1384 aa, Coriobacterium glomerans
MKLRGIEDDYSIGLDMGTSSVGWAVTDERGTLAHFKRKPTWGSRLFREAQTAAVARMPRGQRRRYVRRRWRLDLLQKLFEQQMEQADPDFFIRLRQSRLLRDDRAEEHADYRWPLFNDCKFTERDYYQRFPTIYHVRSWLMETDEQADIRLIYLALHNIVKHRGNFLREGQSLSAKSARPDEALNHLRETLRVWSSERGFECSIADNGSILAMLTHPDLSPSDRRKKIAPLFDVKSDDAAADKKLGIALAGAVIGLKTEFKNIFGDFPCEDSSIYLSNDEAVDAVRSACPDDCAELFDRLCEVYSAYVLQGLLSYAPGQTISANMVEKYRRYGEDLALLKKLVKIYAPDQYRMFFSGATYPGTGIYDAAQARGYTKYNLGPKKSEYKPSESMQYDDFRKAVEKLFAKTDARADERYRMMMDRFDKQQFLRRLKTSDNGSIYHQLHLEELKAIVENQGRFYPFLKRDADKLVSLVSFRIPYYVGPLSTRNARTDQHGENRFAWSERKPGMQDEPIFPWNWESIIDRSKSAEKFILRMTGMCTYLQQEPVLPKSSLLYEEFCVLNELNGAHWSIDGDDEHRFDAADREGIIEELFRRKRTVSYGDVAGWMERERNQIGAHVCGGQGEKGFESKLGSYIFFCKDVFKVERLEQSDYPMIERIILWNTLFEDRKILSQRLKEEYGSRLSAEQIKTICKKRFTGWGRLSEKFLTGITVQVDEDSVSIMDVLREGCPVSGKRGRAMVMMEILRDEELGFQKKVDDFNRAFFAENAQALGVNELPGSPAVRRSLNQSIRIVDEIASIAGKAPANIFIEVTRDEDPKKKGRRTKRRYNDLKDALEAFKKEDPELWRELCETAPNDMDERLSLYFMQRGKCLYSGRAIDIHQLSNAGIYEVDHIIPRTYVKDDSLENKALVYREENQRKTDMLLIDPEIRRRMSGYWRMLHEAKLIGDKKFRNLLRSRIDDKALKGFIARQLVETGQMVKLVRSLLEARYPETNIISVKASISHDLRTAAELVKCREANDFHHAHDAFLACRVGLFIQKRHPCVYENPIGLSQVVRNYVRQQADIFKRCRTIPGSSGFIVNSFMTSGFDKETGEIFKDDWDAEAEVEGIRRSLNFRQCFISRMPFEDHGVFWDATIYSPRAKKTAALPLKQGLNPSRYGSFSREQFAYFFIYKARNPRKEQTLFEFAQVPVRLSAQIRQDENALERYARELAKDQGLEFIRIERSKILKNQLIEIDGDRLCITGKEEVRNACELAFAQDEMRVIRMLVSEKPVSRECVISLFNRILLHGDQASRRLSKQLKLALLSEAFSEASDNVQRNVVLGLIAIFNGSTNMVNLSDIGGSKFAGNVRIKYKKELASPKVNVHLIDQSVTGMFERRTKIGL

SEQ ID NO: 224 - protein, 1077 aa, Neisseria bacilliformis
MQQKPQRYILGLDLGIASVGWACVWADENEHPTGLLDCGVRTFERAEVPKTGDSLALARRQARSVRRLIRRRAHRLLRLRRLLKREGVLLSADFNENGLVRGLPIDAWALRVAGLDRKLSNKEWAAVLLHLVKHRGYLSQRKNETQSKDKELGRLLAGVNGNREALQNRSDEYRTAAELAVKKFAAENNGSLRNKGGDYSHTFDRKDLQRELHLLFERQRALDNPFTSSEMEAAVDELLMKQRSALQGEAVLKMLGRCTFEPSEYKAAKNTYSAERFVWLTKLNNLRIQYNGEERALSEAERRLLLDEPYQKAKLTYKQVRTILELPESAVFKGLRYGHGEDGLKAESGTLMEMKAYHAVRKALKDAGLEGEWENRIRNPELLDAIGTAFSLYKTDEDIRANLAAFRLSENVLEALLAGLNFDKFVHLSLKALAKILPLMEQGMRYDEACKEAYGDHYGAKEQEDHRLLPPFVADDIRNPVVFRTLTQARKIVNEIVRRYGSPLRVHIETGREVGKSFSDRKEIEKRQEENRKERERAAAHFKELFPNFAGEPKAQDILKLRLYEQQHGKCLYSGKEIDLRRLPEKGYVEIDHALPFSRTWDDSFNNKVLVLGKENQDKRNRTPYEYLDGKGNSGAWRAFAERVSGCRFPYAKKQRLLTQKLDEKTEQGFLERNLNDTRYVARFLCQFIEEKMHLEGAGKKRVFASNGQITALLRGFWGLKKVREENDRHHALDAVVVACSSVSMQQKITRHFRYREELEHIDRETGEVIHGFPQPWEFFRQEVMTRVFSDDPVSELAEKLDSRPEAVHEFVTPLFVSRAPHRKVTGQGHLETIRSAKRLDEKISVVKLPLTQLKTKDIERIVGYPNREPALYDALAARLAAFKDDPAKAFSEPFYKTGKDGKCGVLVKAVRVENVQKSGLLVRKDESGKMQGVADNATMVRVDVFGKNGKNYLVPVYAWQVEKGELPNRAVVAYADEEDWDEMDDSFEFKFSLYPNDLVEVVTKKDKFFGYYSGFNRATGAINIKEHDLSKSKVKNGVYEGIGVKTAQSFQKYQVDTLGKTIRLCKPEKRMGFKKK

SEQ ID NO: 225 - protein, 1029 aa, Alicycliphilus denitrificans; identical to SEQ ID NO: 202

SEQ ID NO: 226 - protein, 1122 aa, Streptococcus suis; identical to SEQ ID NO: 96

SEQ ID NO: 227 - protein, 1428 aa, Parasutterella excrementihominis
MGKTHIIGVGLDLGGTYTGTFITSHPSDEAEHRDHSSAFTVVNSEKLSFSSKSRTAVRHRVRSYKGFDLRRRLLLLVAEYQLLQKKQTLAPEERENLRIALSGYLKRRGYARTEAETDTSVLESLDPSVFSSAPSFTNFFNDSEPLNIQWEAIANSPETTKALNKELSGQKEADFKKYIKTSFPEYSAKEILANYVEGRRAILDASKYIANLQSLGHKHRSKYLSDILQDMKRDSRITRLSEAFGSTDNLWRIIGNISNLQERAVRWYFNDAKFEQGQEQLDAVKLKNVLVRALKYLRSDDKEWSASQKQIIQSLEQSGDVLDVLAGLDPDRTIPPYEDQNNRRPPEDQTLYLNPKALSSEYGEKWKSWANKFAGAYPLLTEDLTEILKNTDRKSRIKIRSDVLPDSDYRLAYILQRAFDRSIALDECSIRRTAEDFENGVVIKNEKLEDVLSGHQLEEFLEFANRYYQETAKAKNGLWFPENALLERADLHPPMKNKILNVIVGQALGVSPAEGTDFIEEIWNSKVKGRSTVRSICNAIENERKTYGPYFSEDYKFVKTALKEGKTEKELSKKFAAVIKVLKMVSEVVPFIGKELRLSDEAQSKFDNLYSLAQLYNLIETERNGFSKVSLAAHLENAWRMTMTDGSAQCCRLPADCVRPFDGFIRKAIDRNSWEVAKRIAEEVKKSVDFTNGTVKIPVAIEANSFNFTASLTDLKYIQLKEQKLKKKLEDIQRNEENQEKRWLSKEERIRADSHGICAYTGRPLDDVGEIDHIIPRSLTLKKSESIYNSEVNLIFVSAQGNQEKKNNIYLLSNLAKNYLAAVFGTSDLSQITNEIESTVLQLKAAGRLGYFDLLSEKERACARHALFLNSDSEARRAVIDVLGSRRKASVNGTQAWFVRSIFSKVRQALAAWTQETGNELIFDAISVPAADSSEMRKRFAEYRPEFRKPKVQPVASHSIDAMCIYLAACSDPFKTKRMGSQLAIYEPINFDNLFTGSCQVIQNTPRNFSDKTNIANSPIFKETIYAERFLDIIVSRGEIFIGYPSNMPFEEKPNRISIGGKDPFSILSVLGAYLDKAPSSEKEKLTIYRVVKNKAFELFSKVAGSKFTAEEDKAAKILEALHFVTVKQDVAATVSDLIKSKKELSKDSIENLAKQKGCLKKVEYSSKEFKFKGSLIIPAAVEWGKVLWNVFKENTAEELKDENALRKALEAAWPSSFGTRNLHSKAKRVFSLPVVATQSGAVRIRRKTAFGDFVYQSQDTNNLYSSFPVKNGKLDWSSPIIHPALQNRNLTAYGYRFVDHDRSISMSEFREVYNKDDLMRIELAQGTSSRRYLRVEMPGEKFLAWFGENSISLGSSFKFSVSEVFDNKIYTENAEFTKFLPKPREDNKHNGTIFFELVGPRVIFNYIVGGAASSLKEIFSEAGKERS

SEQ ID NO: 228 - protein, 1371 aa, Lactobacillus buchneri
MKVNNYHIGLDIGTSSIGWVAIGEDGKPLRIKGKTAIGARLFQEGNPAADRRMFRTTRRRLSRRKWRLKLLEEIFDPYITPVDSTFFARLKQSNLSPKDSRKEFKGSMLFPDLTDMQYHKDYPTIYHLRHALMTQDEKFDIRMVYLAIHHIVKYRGNFLNSTPVDSFKASKVNFVDQFKKLNELYTAINPEESFQINLANSEDIGHQFLDPSIRKFDKKKQIPKIVPVSVDDKATDKINGKIASEIINAILGYKSKLDVVVQCTPVDSKSWALKFDEEDIDAKLQKILPEMDENQQSIIAILQNLYSQVTLNQIVPNGMSLSESMIEKYNDHHDHLKLYKKIIDQLADPKKKAALKKAYSQYVGDDGKVIEQADFWSSVKKNLDDSDLSKQIMDLIDAEKFMPKQRTSQNGVIPHQLHQRELDEIIEHQSKYYPWLAEINPNKHDLHLAKYKIEELVAFRVPYYVGPMITPDDQAKSAETVFSWMERKGKEAGQITPWNFDEKVDRNASANRFIKRMTTKDTYLIGEDVLPDESLLYEKFKVLNELNMVRVNGKLLKVADKQAIFQDLFENYKHISVKKLQNYIKSKTGLPSDPEISGLSDPEYFNNSLGTYNDFKKLFGNKVDEPDLQDDFEKIVEWSTVFEDKRILREKLNEITWLSDQQKDVLESSRYQGWGRLSKKLLTGIVNDQGERIIDELWNTNKNFMQIQSDNDFAKRIHEANADQMKAVDVEDVLADAYTSPQNKKAIRQVVKVVDDIQKAMGGVAPKYISIEFTRSEDRNPRRTISRQRQLENTLKDTAKSLAKSINPELLSELDNAAKSKKGLTDRLYLYFTQLGKDIYTGKPINIDEISTYDIDHILPQAFVKDDSLNNRVLVSKAINNGKSDNVPVQLFGAKMGHFWKQLAEAGLISKRKLKNLQTDPDTISKYAMHGFIRRQLVETSQVIKLVANILGDKYRNDNTKIIEITARMNHQMRDEFGFIKNREINDYHHAFDAYLTAFLGRYLYHRYIKLRPYFVYGDFKKFKEDKVTMRNFNFLHDLTDDTQEKIADAETGEVIWDRENSIQQLKDVYHYKFMLISHEVYTLRGAMFNQTVYPASDAGKRKLIPIKADRPINVYGGYSGSADAYMAIVRIHNKKGDKYRVVGVPMRARDRLDAAKKVSDADCDRALKDVLTPQLTKTKKSRKTGEITQVVEDFEIVLGKVMYRQLMIDGDKKFMLGSSTYQYNAKQLVLSDQSVKTLASKGRLDPLQESMDYNNVYTEILDKVNQYFSLYDMNKFRHKLNLGFSKFISFPNHNVFDGNTKASSGKREILEEVLNGLHANPTFGNLKDIGITTPFGQLQQPNGILLSDEAKIRYQSPTGLFERTVSLKDL

SEQ ID NO: 229 - protein, 1090 aa, Sphingomonas sp.
MDWRLGLDLGANSLGWAALRLDRAGDPIGILAMGSRIFSDGRDPKSGASLAVDRRAARAMRRRRDRFKQRQAALLKYLIRDGLFPADQADRQRLADEDPYALRARALDEELSLFEIGRALFHLNQRRGFQSNRKADRGQDDEAGKIAVGVDRLNQQMEEQGARTLGEFLHQRRRAATDANHIPSVRTRLRPETGEGAKGDGYDFYPSRALIAEEFEEIWAAQAPHYPDTLTQQVHDRLYEIIFHQRPLRAPQVGQCTLVAGETRLPKAHPLFQKRRLLEEINALMIVRPGEIAQRLTPEERDTLYLKLKDKRTVSFATLRKTLKLDSAARFNKESENRTELKGDEVAAELGAKTRLGTRWQHLSGDQQWEVVHRLMALESQADEAAFRDWISQTYDLLPEQAAAVLGARLPQGHGRFGPTATTTLIDSLLHDRTEDGRVVVYSEAVQRSGLGHHSDLRHDRDDEDVTELPYYGVALERHIMPGTAEPTDPEEMRIGRLTNPTVHIGLNQLRHVVNRLIRAYGPPKEIAIELARELKLSEDEKKKRNSENRDNRLAAEGRSKKLEEIRQRDTGANRALLKLWEELNPGNVLDRRCIYTGEQISIDMLFSDRVEVDHILPFAQTLDDSNGNKLLCLREANREKRRRSPYEAWGHTDRWPDIAERASRLPKPKRWRFEPDAMQRFATEDGFLARHLVDTQYLGRLAREYLSWLYPGRGEGSGHVWVSPGRLTEMVRRKLGLNDLLPDHNFGGGADQPKNRLDHRHHAIDALVVAIVDRGMLQAIARASGQDGSEGRERIHIPAPWDGFRDDLRVAVNGIIVSHRPDHGTVAKAGLARGRDQTAGRLHNDTAYGLTGETDAKGNSIVVRRIPLSAIKKPADIARVRDPLLRNALAEFTKGLDGKAFEARIGRFHELGPLLYRGIRRVRVVETLTVIPIRDAEGRAYKGYKGDSNYRYDVWEMPDGKWRCQVVSMFDAHQSTEQARPHPAARKILSLQRNDILAIERTEGDRELVRVVKFSEKQFAVAPPHEGGSLKTRDGNADDPFRYLYPSPNTLKGWRARQVRIDELGRVLDPGFPARKSVRRTRPRAAPVD

SEQ ID NO: 230 - protein, 1000 aa, Kingella kingae
MARAQRRLISRRANRMNKLRRLLKQENVLQANDYDEKGLIIGLPNQAWELRAQGLDRKLEPKEWAAVLINLVKHRGYLSQRKNESQTADKELGALLSGMNHNHQLLQSQSNQYRTPAELAIKQFATQDGHIRNQRGAYTHTFNRLDLQNELNQLFDAQTRLGNPHVSGSLKTAINDLLMNQKAALSGDAILEMLGRCTFEPSEYKAAKNTYSAERFVWLGKLTNLRIQDNGLESALSREQRELLLNEPYNKTKLTYQQVRKLLRLPETAFFKGLRYGKDNAESATFMEMKSYHAIRKSLENKSLKSEWEKLKTQPKLLDLIGTAFSIYKTDDEIAGCLKNQLPENVIIALQEQLNFSNFMELSLKALEKLLPLMEQGLRYDEACTQIYGNRHEKIADKTEKFLPNIPADKLRNPVVLRTLTQARKVINAIIRRYGSPARVHIETGREVGKSFSDRDKLKKQQEENQEQRRRAIDEWKQFFPNAAHEPKAVDILKLRLYQLQQGKCLYSGLPIDVRRLPEKGYVEIDHALPFSRTWDDSFNNKILVLASENQNKGNQTPYEYLRGADNSESWRLFVENVQNCQFSPNKKQKIMAKQLDEKGFLERNLNDTRYVSRFLCQFISEHLHLTGKGKKRVFASNGQITALLRGRWGLSKNREENDRHHAVDAVVVACSTVAMQQKITQFVRYQKGNVFTGERIDKETGEVISIHFPTPWEHFREEVMIRVFDDNPLRTLPEKLPNRPEALHEYVMPLFVSRMPTRKMTGQGHKETIKSAKRLDEKISVLRVPLTQLKLNDLENMVNREREPALYEALKARLEQFKNDPAKAFAEPFFKQGGQQVKAVRVEIVQKSGMLLRKINGVADNGSMVRVDVFEKSGKFYLVPIYAWQVAEGILPNYAVVAHKDESDWILMDESYHFKFALYKNDLLEVQTKKGGIMGYFASLDRATGAITIREHDRDKKKCKDGEHRSIGVKMASSFKKLQVDELGKNIHETRSRKRPNIG

SEQ ID NO: 231 - protein, 1130 aa, Streptococcus pasteurianus
MTNGKILGLDIGIASVGVGIIEAKTGKVVHANSRLFSAANAENNAERRGFRGSRRLNRRKKHRVKRVRDLFEKYGIVTDFRNLNLNPYELRVKGLTEQLKNEELFAALRTISKRRGISYLDDAEDDSTGSTDYAKSIDENRRLLKNKTPGQIQLERLEKYGQLRGNFTVYDENGEAHRLINVFSTSDYEKEARKILETQADYNKKITAEFIDDYVEILTQKRKYYHGPGNEKSRTDYGRFRTDGTTLENIFGILIGKCNFYPDEYRASKASYTAQEYNFLNDLNNLKVSTETGKLSTEQKESLVEFAKNTATLGPAKLLKEIAKILDCKVDEIKGYREDDKGKPDLHTFEPYRKLKFNLESINIDDLSREVIDKLADILTLNTEREGIEDAIKRNLPNQFTEEQISEIIKVRKSQSTAFNKGWHSFSAKLMNELIPELYATSDEQMTILTRLEKFKVNKKSSKNTKTIDEKEVTDEIYNPVVAKSVRQTIKIINAAVKKYGDFDKIVIEMPRDKNADDEKKFIDKRNKENKKEKDDALKRAAYLYNSSDKLPDEVFHGNKQLETKIRLWYQQGERCLYSGKPISIQELVHNSNNFEIDHILPLSLSFDDSLANKVLVYAWTNQEKGQKTPYQVIDSMDAAWSFREMKDYVLKQKGLGKKKRDYLLTTENIDKIEVKKKFIERNLVDTRYASRVVLNSLQSALRELGKDTKVSVVRGQFTSQLRRKWKIDKSRETYHHHAVDALIIAASSQLKLWEKQDNPMFVDYGKNQVVDKQTGEILSVSDDEYKELVFQPPYQGFVNTISSKGFEDEILFSYQVDSKYNRKVSDATIYSTRKAKIGKDKKEETYVLGKIKDIYSQNGFDTFIKKYNKDKTQFLMYQKDSLTWENVIEVILRDYPTTKKSEDGKNDVKCNPFEEYRRENGLICKYSKKGKGTPIKSLKYYDKKLGNCIDITPEESRNKVILQSINPWRADVYFNPETLKYELMGLKYSDLSFEKGTGNYHISQEKYDAIKEKEGIGKKSEFKFTLYRNDLILIKDIASGEQEIYRFLSRTMPNVNHYVELKPYDKEKFDNVQELVEALGEADKVGRCIKGLNKPNISIYKVRTDVLGNKYFVKKKGDKPKLDFKNNKK

SEQ ID NO: 232 - protein, 1119 aa, Lactobacillus coryniformis
MGYRIGLDVGITSTGYAVLKTDKNGLPYKILTLDSVIYPRAENPQTGASLAEPRRIKRGLRRRTRRTKFRKQRTQQLFIHSGLLSKPEIEQILATPQAKYSVYELRVAGLDRRLTNSELFRVLYFFIGHRGFKSNRKAELNPENEADKKQMGQLLNSIEEIRKAIAEKGYRTVGELYLKDPKYNDHKRNKGYIDGYLSTPNRQMLVDEIKQILDKQRELGNEKLTDEFYATYLLGDENRAGIFQAQRDFDEGPGAGPYAGDQIKKMVGKDIFEPTEDRAAKATYTFQYFNLLQKMTSLNYQNTTGDTWHTLNGLDRQAIIDAVFAKAEKPTKTYKPTDFGELRKLLKLPDDARFNLVNYGSLQTQKEIETVEKKTRFVDFKAYHDLVKVLPEEMWQSRQLLDHIGTALTLYSSDKRRRRYFAEELNLPAELIEKLLPLNFSKFGHLSIKSMQNIIPYLEMGQVYSEATTNTGYDFRKKQISKDTIREEITNPVVRRAVTKTIKIVEQIIRRYGKPDGINIELARELGRNFKERGDIQKRQDKNRQTNDKIAAELTELGIPVNGQNIIRYKLHKEQNGVDPYTGDQIPFERAFSEGYEVDHIIPYSISWDDSYTNKVLTSAKCNREKGNRIPMVYLANNEQRLNALTNIADNIIRNSRKRQKLLKQKLSDEELKDWKQRNINDTRFITRVLYNYFRQAIEFNPELEKKQRVLPLNGEVTSKIRSRWGFLKVREDGDLHHAIDATVIAAITPKFIQQVTKYSQHQEVKNNQALWHDAEIKDAEYAAEAQRMDADLFNKIFNGFPLPWPEFLDELLARISDNPVEMMKSRSWNTYTPIEIAKLKPVFVVRLANHKISGPAHLDTIRSAKLFDEKGIVLSRVSITKLKINKKGQVATGDGIYDPENSNNGDKVVYSAIRQALEAHNGSGELAFPDGYLEYVDHGTKKLVRKVRVAKKVSLPVRLKNKAAADNGSMVRIDVFNTGKKFVFVPIYIKDTVEQVLPNKAIARGKSLWYQITESDQFCFSLYPGDMVHIESKTGIKPKYSNKENNTSVVPIKNFYGYFDGADIATASILVRAHDSSYTARSIGIAGLLKFEKYQVDYFGRYHKVHEKKRQLFVKRDE

SEQ ID NO: 233 - protein, 1126 aa, Lactobacillus farciminis
MADRISLGLDIGVASVGFSVLDIDKGKVIELGARLFSATVAAGNQDRRDMRGARRLLNRNKQRRQDTGKLFKKFGLIDDFDKGSFYDNFNQNLNPYELRVKGLTEQLTKEELAESLYQIVKHRGISYALKDADVDEGGTDYSVSLKINSQELAEKTPAQIQLQRLNDYGKVRGQVVIGDDPDNQKVLLNVFPTSAYEKEAKQIIATQQQFYPESLTDKFTEEYCQILTRKRDYFVGPGNEKSRTDYGIYKTDGRTLDNLFEELIGHDKIYPEELRASAASYTAQLFNVLNDLNNLRILNYEDGKLTKEDKEKIIAEIKNNTTTINMLNVIKKVAGCSKDDIKGFRVNEKDKPEISSMPVYRKIHKDLLKAGVDISDWPVEFIDELSFILTLNTENGEIRKQLNNRLAPKFDFLNADLIQLIIDNKDSFEIKTNNKWHRFSVKTMNKLIPEMMERPVEQMTLLNEMGLVKKDKKRFENNKYLPYKEIAKDIFNPVASKSVREALKIVNAVLKKYGHIDYLVVEMPRDKNLKEEQDNIKEFQNKNKKAKDAAFEAFVKSVGSEQRVKEALSKNRKLQMKMRLWYQQQEIDPYNGKTIDATDLINNPDKFEIDHIIPQSISFYDSINNKTLCFASMNQVKGQKTPYEFMLEGHGQSYDKFKATVMANKNFGKAKRANYLFEENVSDIETRKRFLSRNLVDTRYSSRVVLNSLQDFFREKSADTKVTVIRGKFTSNMRKHWHIDKTRETFHHHAIDASIIAATPFLRMWKKGGTIFPVKVGEESIDIETGEILDDKNFDKAMYEEPYSGFVSEIMNADDRIKFSHQVDKKMNRKVSDATIYSTRTGKLAKDKKDAEYIVAKVKDIYSVDGFKKFKKVYDKDKTKFLLYKYDPRTFSKLERIISDCPDKVEKVQTNGKVKAVDISPFEMYRRDHGMIKKYSKKGNGPAIKQLKYLDKKLGSHIDITPANANGKHVILQSLKPWRTDVYLNHETGEYEIMGIKYSDLKFNKNEGYGIKKDKYLEIKKVEEVSEKSEFMFSLYRKDRVKVQDMKTGESVELLFWSRNFSNKKYAELKPISQAENDKKLPVYGKGRLIKRLIPKNCKIWKVNTTILGDPYYLEKESDSPKDILD

SEQ ID NO: 234 - protein, 1380 aa, Eggerthella sp.
MNLRHVGNYNIGLDMGTASVGWAAIDEQGELLHFKGKPTWGSRLFDSANTAATARMPRGQRRRYIRRRWRLDLLQKFFSEEMAEKDPEFFIRLRQSSLWPEDREGGHTAYHWPLFNDSDFNEKEYYEKFPTIFHLRQWLMETDEKADIRLIYLAFHNIVKHRGNFLQENNDSLSAQNANMRESLESFCIALEEWCDEKELTCSCDPQKLEHLFKEVKYRSDIRDGFAALLGLACSGENEVDVKAMAKEMGKAIVGYKADFSKIFTECDKEGSSFRLSDDEGPEAFLDICPDDGIALFEAIQMVYSSFILTGMLTEKGLSLSKISAYNQYGQDLESLKALVKEYVPNEYSSFFRGPTYSGSTEYDPSKAQGYTRYNLGPSKKGSGAKPMAYEDFKKSVEQLFANTNAINDERYKEMMGRFAEEKFLRRLRTSDNGRIPFQLNLEEMTAIIINQGKYYPFLLEQQEKLESLVRFRIPYYVGPLTRINARLDSKGNACFAWSKRKDGMDSASIKPWNWDEVIDKHASAQAFIERMTGTCTYLRGEPVLPRCSLLYEEYCVLNELNGARWTQDGDKFIRFDYKDRSDIIEELFKKRRGRIQYAAVADWMKQERSHANVHVSGGQGENAFESRLSSYHFFCNDVFGVDELPGSYVDMVEEIILWSTLFEDRSILREEIQRKYGDVLNEEQIKTICKKRFSGWGRLSRKLLCSLKAQTDNGPKSIMDILQEGDQNNGRVGRAMVFQEILHDEQLGFEQKIEEENTQSMLEGENLLIEDLPGSPAIRRSINQAVRIVDEIVGIAGHAPDNIFIEVTREDDTKKKGKRTTTRYSNIQKALEALKEEGAEALRELKTYKHNELDKRLSLYFMQNGKSLYSGIPLDIRRLSEYQIDHIIPQSYIKDDSYENMALVLPGENQSKADNLLISQDIRIKMKATWTALHKAGLMGDKKYNNLMNSSISDAKMKGFINRQLVETSQSVKLTQMMLSQKYPGAKVRPIKASISSQLRDACDLVKCREANDYHHAHDAYLACQVGRFVLKRHSSMFDNPIGMTKVIRDFVKRQGQEFKRNGKLPAYASRSGFIVQSFMRSGFDAETGELLRDDWNAPFEIARIKRCLNYRDCYISRMPMEDSGAFWDATIYSPKAGKKGALPVKQGLPVEKYGSYSREQFAYFFVYKAYNPKKKAYRLEFEAVPVRVASAVETRENALEEYAKSVAKQAGLEFVEVARPKVYKYQLIELGEDRLYITGKREVRNASQLAFSLDEIDLLKRLAEGEETSSEERERLFDVLIEKYARYAPRLARQLSVDSMSATFETLNAEEQLGILLSLVEIANGKRNMIDLSSAGGSKNAGCMNPTFSSELSSPGSNFTFIDQSVTGMFERRQRLEL

SEQ ID NO: 235 - protein, 1430 aa, Capnocytophaga canimorsus
MKHILGLDLGTNSIGWAVVKEAQNDNEQSEIVDVGVRVNPLTTDEKTNFEKGKPISTNADRTLKRSARRNLQRYKLRRKELIELLKEHQLISTDTILTENGKGTTFQTLELRAKSAKEKISLEELARVFLTINKKRGYKSSRKAKNEDEGQLIDGMEIAKRLYEENLTTGQLSLQLLKEGKKSLPDYYRSDLQFELDKVWNFQKQFHSHILTDEFYAQLKGKGQRATSALFLAKYQIYTAENKGSREDKKLQAYQWRVDALSKELTREQLAFVITEINNNLNNSSGYLGAISDRSKELYFNNETVGEYLWKQIAANPHTSLKNQVFYRQDYLDEFEQIWKTQSAFYPEILTDELKKELRDVVIFYQRKLKSQKSLVSFCEFENKEIEIKKEDGTSTKKVIGLKVAPKSSPLFQEFKIWQNLNNVLIRKKGSKTKKVDKNQQAVLFEEEKTIFELDLEAKQALFNELNLKGNLKAYYCLEILGYSPKEWEMNYSVLEGNRTNKALYEAYLKITDLEGYDAKNHLKVKLNKDEVELDDLKVPASEIKDMVQAIFKEAGINTDILHFNAELDGKDFENQASYQLWHLLYSYEGDDSKSGNELLYKLLETKFGFKKEYAQILANVSLSDDYGSLSTKAMRKIHPYIKENKFSTACELAGYRHSKHSLTKEENDNRVLKDSLEVLKKNSLRQPVVEKILNQMINLVNALLKKYRTENPNFKFDEIRIELARELKKNAEERANMTVNINKAKTEHEKIIKILKNEFGLPNPTRNDIIRYRLYEELKANGYKDLYTNEYIEKQDLFTKNIDIEHIIPKSRVFDDSFSNKTLSFRKTNLDKGERTAFDYIESKFGADKLEEYVARVEDLYKNNIISKAKYQKLLKKESEIGDGFVERDLRETQYIAKKAKEILLQITPNVLSTSGGITDRLREDWDLINVMKELNLPKYRALGLTQMEDRKYGQQVEVIIDWTKRNDHRHHAMDALTVAFTKHNHIQYLNYLNARKNEKHREHSNIMGIQQLETIKVTDKNGNEKRVFKAPMPNFRQVTKAFLENVLISHKAKNKVVTKNKNKVAGSNKVQEVLTPRGQLHKETVYGKYQYYVQKEEKIGGKFDLETIKKVANPLYQSLLKKRLEENGGDPKKAFTGKNSLAKNPIYLDDAQTEQLPEKVKLVWLENSFSIRKDITPENFKDEKLIDKILDEGVKRILKERLQSFGNDAKKAFSDLDKNPIWLNKEKGIAIKRVAISGVANAEPLHTKKDHLGKEILDKEGKSIPVDFISTGNNHHVAVYRDEKGNLQEKVVSVFEAVVRANQGLPIIDKTYNQHLGWEFLFTMKQNEMFVFSNESTGFNPNDIDLLDPKNKKIISPNLFRVQKFSKLQYGNSFVREFVFRHHLETTVEDRKELQGITYKQMKNSAFFNDIIKVRINHLGGIVSVGEY

SEQ ID NO: 236 - protein, 1348 aa, Finegoldia magna
MKSEKKYYIGLDVGTNSVGWAVTDEFYNILRAKGKDLWGVRLFEKAKTAADTRTFRSGRRRNDRKGVRLQILREIFEDEIKKVDKDFYDRLDESKFWAEDKKVSGKYSLFNDKNFSDKQYFEKFPTIFHLRKYLMEEHGKVDIRYYFLAINQMMKRRGHFLIDGQISHVTDDKPLKQQLILLINDLLKIELEEEFMDSIFEILADVNEKKTEKKNILKELINAQDFNKQEGKILYSIFESIVTGKAKIKNIISDEDILEKIKEDNKEDFVLTGDSYEENLQYFEEVLQENITLFNTLKSAYDFVILQSILKGKSTLSDAQVERYDEHKKDLEILKKVIKKYDEDGKLFKQVFKEDNGNGYVSYIGYYLNKNKKITAKKKISNIEFTKYVKGILEKQCDCEDEDVKYLLGKIEQENFLLKQISSINSVIPHQIHLFELDKILENLAKYYPSFNNKKEEFTKIEKIRKTFTFRIPYYVGPLNDYHKNNGGNAWIFRNKGEKIRPWNFEKIVDLHKSEEEFIKRMLNQCTYLPEETVLPKSSILYSEYMVLNELNNLRINGKPIDTDVKLKLIEELFKKKTKVTLKSIRDYMIRNNFADKEDFDNSEKNLEIVSNMKSYIDFNNILGDKFELEMVEDLIEKITIHTGNKKLLKKYIEETYPDLSSSQIQKIINLKYKDWGRLSRKLLDGITGTNIETGEIDTVINFLRNSSDNLMQIIGSQNYSFNNDIDKLRKKYIPQEISYEVVENLYVSPSVKKMIWQVIRITEEITKVMGYDPDKIFIEMAKSEEGKKTTISRKNKLLALYKAIKKDERDSQYEKLLTGLNKLDDSDLRSRKLYLYYTQMGRDMYTGEKIDLDKLFDSTHYDKDHIIPQSMKKDDSIINNLVLVNKNANQTTKGNIYPVPSSIRNNPKIYNYWKYLMEKEFISKEKYNRLIRNTPLTNEELGGFINRQLVETRQSTKAIKELFEKFYKKSKIIPVKAILASDLRKDMNTLKSREVNDLHHAHDAFLNIVAGDVWNREFTSNPINYVKENREGDKVKYSLSKYFTRPRKSKGKVIWTPEKGRKLIVDTLNKPSVLISNESHVKKGELFNATIAGKKDYKKGKIYLPLKKDDRLQDVSKYGGYKAINGAFFFLVEHTKSKKRIRSIELFPLHLLSKFYEDKNTVLDYAINVLQLQDPKIIIDKINYRTEIIIDNFSYLISTKSNDGSITVKPNEQMYWRVDEISNLKKIENKYKKDAILTEEDRKIMESYIDKIYQQFKAGKYKNRRTTDTIIEKYEIIDLDTLDNKQLYQLLVAFISLSYKTSNNAVDFTVIGLGTECGKPRITNLPDNTYLVYKSITGIYEKRIRIK

SEQ ID NO: 237 - protein, 1352 aa, Megasphaera sp.
MKKRNREEYYVGLDIGTSSVGWAVATPDYRIPKFRGHKMWGSRLFAEGKRAAERRQFRTNRRRLARRRDRLQILEELFAEEMAKVDNTFFMRLKESKFFLEDKTVKEKHILFSTDKFDADRFYKDNPTIYHVRKRLMEEEPQDIRELFLAVHHILKYRGHFLFAGSLEQNGASIEELVRTLLGKQGLAILDDTIDSNEMVNILKNTGETKSDRKKDVQELWNPLKDKVKKAQAAEMAGLVLGLKSDISKLFANSDYKDLDSSIKNINFSSGDYEEKRDDYANSIGDDIVLLDTMKALYDTLILSQILQGKRSISAAKVEDYNTHKEQLRALKAILKPHKRLYNEMFRENNKKDLSNYVAYISSYSEGKRVNREGFYKYVQAVLKQVDDSDSKQAILEAIRLETFLPLLRVKDNAVIPHQIHQAELEAILETARKKYNFLNDVSDGVSVKDKIIQLFTFRIPYYVGPLNPHSGETVADRKQGTGWVVRKQRGKVYPWNFADMVDVKASAEAFITNLTNKCTYLIGEDVLPKRSLLYSEFMLLNELNMIKYDGHELPVAIKQLYIEQVFKQEHKKQTKGRVLDFLKRNGLITGSATAVITGMDDAIKGDLQSYRDMVRIFGAGFDHSMAERIIRWVTLFGEAKDILENKIREVYGNSISDSQMRAIKKLKYADWGRLSQAFLIAVKGCDKSGVERNIITCLRASSQNLMEILSDQGTYIKQIKAWNHQHTTNMMDTLDYQLVDDLYVAPSVKRSIWQSLCIVEELVKIMGQAPKKIFVEVTRTKQAEKTKKDSRKKRLVELYTAIGKEGAAWKKEIEAHQAGDFRRKKLYLYYTQMGRCMYSNEPIAMDALFTSAYDIDHIYPQSLTKDGSWDNLVLVKSQLNKEKSDQYPLRPAIREKNKAHWQYLCRAGFISEKKYERLMRTTELTAEELSGFIARQLVETSQATKAVTGLLERIYTNTEICFVKAETVSQFRHQHNFIKIRELNNYHHAKDAYLNIVVGNVYHEKFTKNPWEFIARSTERRPYNLNRMYDFDLLKQGRVIWQVPKSLETVQAMMKSNDVRITKKLLVQKGELYDATITKAHKAKEGTYFPLKGADARLRDVHRYGGYEKIKIAYYSVFSCREKASNTIHTLIIPIPVYKAGLLQTEADLTAYAWQTKQKTKPIKDIYSAITPIYKKLCINTVVKIDGFKYFLGGKTGDYMWLDPAIPVVLDEQAAAYLKAISKVGRADDVENTAQAIDLITAEANEAFYDVLLKKMEAKIFAKAYQTIVEKLASETARERFRELSIGAQCSCLLEILNLLANNKTTFTFFKDKMGVTMSRRKQPMDLTKLEECIVYETSITGLYEKAVSLL

SEQ ID NO: 238 - protein, 650 aa, Haemophilus pittmaniae
MENKNLHYILGLDLGIASVGWAVVEIDKEENPLCLIDVGVRTFERAEVPKTGESLALSRRLARSARRLTQRRVARLKKAKRLLKLENILLSTDERLPHQVWQLRVEGLDRKLKRQEWAAVLLHLIKHRGYLSQRKNESKSENKELGALLSGVASNHELLQQTTYRTPAELAVKKFEVEEGHIRNQQGAYTHTFSRLDLLAEMELLFSRQQHFGNPFASEKLLENLTALLMWQKPALSGEAILKMLGKCTFEDEYKAAKNTYTAERFVWITKLNNLRIQENGLERALNDNERLILIEQPYEKAKLTYAQVRSILNLSDEAIFKGLRYSGEDKKAIETKTTLMEMKAYHQIRKVLEGNNLKAEWTELKENSTLLDEIGTAFSLYKTDEDISTYLAGKLSQPVLNALLENLSFDKFIQLSLKALYKLLPLMQQGLRYDEACHEMYGDHYGKKTYGKKTEENHYFLPQIPADEIRNPVVLRTLTQARKVINGVVRLYGSPARIHIETGREVGKSYKDRRELEKRQEENRKQRENAIKEFKEYFPHFAGEPKAKDILKMRLYKQQNAKCLYSGKPIELHRLLEKGYVEVDHALPFSRTWDDSFNNKVLVLANENQNKGNLTPFEWLDGKHNSERWRAFKALVETSAFPYAKNNAS

SEQ ID NO: 239 - protein, 1062 aa, Ralstonia syzygii
MAEKQHRWGLDIGTNSIGWAVIALIEGRPAGLVATGSRIFSDGRNPKDGSSLAVERRGPRQMRRRRDRYLRRRDRFMQALINVGLMPGDAAARKALVTENPYVLRQRGLDQALTLPEFGRALFHLNQRRGFQSNRKTDRATAKESGKVKNAIAAFRAGMGNARTVGEALARRLEDGRPVRARMVGQGKDEHYELYIAREWIAQEFDALWASQQRFHAEVLADAARDRLRAILLFQRKLLPVPVGKCFLEPNQPRVAAALPSAQRFRLMQELNHLRVMTLADKRERPLSFQERNDLLAQLVARPKCGFDMLRKIVFGANKEAYRFTIESERRKELKGCDTAAKLAKVNALGTRWQALSLDEQDRLVCLLLDGENDAVLADALREHYGLTDAQIDTLLGLSFEDGHMRLGRSALLRVLDALESGRDEQGLPLSYDKAVVAAGYPAHTADLENGERDALPYYGELLWRYTQDAPTAKNDAERKFGKIANPTVHIGLNQLRKLVNALIQRYGKPAQIVVELARNLKAGLEEKERIKKQQTANLERNERIRQKLQDAGVPDNRENRLRMRLFEELGQGNGLGTPCIYSGRQISLQRLFSNDVQVDHILPFSKTLDDSFANKVLAQHDANRYKGNRGPFEAFGANRDGYAWDDIRARAAVLPRNKRNRFAETAMQDWLHNETDFLARQLTDTAYLSRVARQYLTAICSKDDVYVSPGRLTAMLRAKWGLNRVLDGVMEEQGRPAVKNRDDHRHHAIDAVVIGATDRAMLQQVATLAARAREQDAERLIGDMPTPWPNFLEDVRAAVARCVVSHKPDHGPEGGLHNDTAYGIVAGPFEDGRYRVRHRVSLFDLKPGDLSNVRCDAPLQAELEPIFEQDDARAREVALTALAERYRQRKVWLEELMSVLPIRPRGEDGKTLPDSAPYKAYKGDSNYCYELFINERGRWDGELISTFRANQAAYRRFRNDPARFRRYTAGGRPLLMRLCINDYIAVGTAAERTIFRVVKMSENKITLAEHFEGGTLKQRDADKDDPFKYLTKSPGALRDLGARRIFVDLIGRVLDPGIKGD

SEQ ID NO: 240 - protein, 1052 aa, Haemophilus parainfluenzae
MENKNLHYILGLDLGIASVGWAVVEIDEKENPLRLIDVGVRTFERAETQKGESLALSRRSARSARRLTQRRVARLKKAKRLLKSENILLSTDERLPHQVWQLRVEGLDRKLERQEWAAVLLHLIKHRGYLSQRKNESKSENKELGALLSGVASNHELLQQATYRTPAELAVKKFEVEEGHIRNQQGAYTHTFSRLDLLAEMELLFSRQQHFGNPFASEKLLENLTALLMWQKPALSGEDILKMLGKCTFEDEYKAAKNTYTAERFVWITKLNNLRIQENGLERALSDNERLMLIEQPYEKAKLTYAQVRSILNLSDDAIFKGVRYSGEDKKAIETKTTLMEMKAYHQIRKVLEGNNLKAEWVALKANPTLLDEIGTAFSLYKTDEDISAYLAGKLSQPVLNALLENLSFDKFIQLSLKALYKLLPLMQQGLRYDEACREIYGDHYGKKTEETHHFLPQIPADEIRNPVVLRTLTQARKVINGVVRLYGSPARIHIETGREVGKSYKDRHELKKRQEENRKQREKTISEIKTLFPNFSGEPKGKDILKMRLYYQQNAKCLYSGKPLELHRLFEQKYVEVDHALPLSRTWDDSFNNKVLVLANENQNKGNLTPFEWLDGKNNSERWRTFKALVETSAFPYAKKQRILSQKLDEKGFIERNLNDTRYVARFLCNFIADNMHLTGEGKRKVFASNGQITALLRRRWGLAKSREDNDRHHALDAVLVACSTVAMQQKITRFVRFKAGDVFTGERIDRETGEIIPLHFPTPWQFFKQEVEIRIFSDNPKLELENRLPDRPQANHEFVQPLFVSRMPTRKMTGQGHMETVKSAKRLNEGISMIKMPLTKLKLKDLELMVNREREKDLYDALKTRLEAFNDDPAKAFAEPFMKKGGAIVKSVRVEQVQKSGVLVRQGNGVADNASMVRVDVFTKDGKYFLVPIYTWQVAKGILPNKAVIQGKDEEDWEDIDDATFQFSLHPNDLISVKTKKDEFLGYFNGLNRHTGGINIRTHDLEKSKGKQGIFEGIGVKIALSFEKYQIDELGKNIRLCKPSKRQPVR

SEQ ID NO: 241 - protein, 1331 aa, Lactobacillus sanfranciscensis
MNKQPYNIGLDIGTSSVGWSATELDNRLLHIKGHNGIGVRLFKEGESAADRRGFRTTRRRLARRKWRLRLLNEIFATEIAKVDPSFFARLKQSNVSPKDPNKTMFENILFDDENLDDQKFHHDYKTIYHLRQAIINHPEQKFDIRLIYLAMHHIIKYRGHFLNQANVQDFKGGKIDLEKSFKALNDIFENQGRDLRLVTDKANQYVKVLSDNAKTRSDRKKELSKLLYVPIDKDTDKNSKKVTGEILKAILGNKAKFDVIFGIEVENPKEWVLTFNSDDFDDKIEGLSSQMTDEDSEILLILKELYFALNLSDILNNSVTDKNAKTLSEAMINRYDDHKNQLAMLKKVIDSSDKKHAKELKEAYSAYIDGENNKKISFEDLKKRIQKNLVDSELSQKINDLLDHDYFLPKQRSKENGAIPHQLQQQELDQIIESQKQYYPFLAELNPNEKRSRQAKYKLDELVAFRVPYYVGPMVEVTDSNQENNGKFAWMIRKEQGEITPWNFDEKVDRTETATKFITRMTTTDTYLIGEPVLPKNSLLYQKFVVLNELNNLKINQEIITPGQKQYLYEHVMKKNKRVTLKKIADALVIKGDYPYAPEVKGTTDQKNLNNGLTTYIDLAKIFGNELDDVDREADFEKIIEWSTIFEDQHIFALKLQELKWLTEKQRNQVVKLRYQGWGKLSKELLAGLVDDNGQRIIDLLWSDNQNFMQIVNQKSFKESIADHNGAHLEEKNLKDVINDLYTSPQNKKAIRQVILVVDDIINAVGYEPANIMMEFAREDSNDHRLTNSRSRQLENVYKDITNSWFDNDSVKDELEDKIKNKDKFTDRLYLYFTQGGKDLYTGEPLNIDDLSSYDIDHILPQSFILDNSLDNRVLTSQRNNRVSKEDQLPGELFGTKMHAFWKRLKAAHLISNKKYYNLTLTPNSISKFNNQGRFINRQLVETRQVIKLAAEILHNRYSEEKGTNIVTIKANLTHHMREKFNFYKNRNVNDYHHAFDAYLTAFVGNWLLQQYPKLKPYFVYGDFAKTEINNLKSFNMLYKFEQAHQLNEKDGKIAKDADALLGYMKNVYHFKKMLVTKKLETNHGALFKQTLYPSPAHDIKKRQLIKPKDNRPTDIYGGYTHEERKYMSLVKVIGKKDNEYRMANVPLLKINKNNDIKEILKSQFSNKKFEIVLPKVLKNQLFSENGALFVIGSKGYKYNANQLVLSDLDMKLLNDLSNNKSIDEVTINQLFKNIVDSTNKYMPLYEIKNLNEVVEKFNNLEFNDKKKTITDFLLATHANPTMSNLKNIGLPSYFGRFTSGNAGIKLSENANVIYQSPTGLFSRKVKISDF

SEQ ID NO: 242 - protein, 1473 aa, Flavobacterium branchiophilum
MAKILGLDLGTNSIGWAVVERENIDFSLIDKGVRIFSEGVKSEKGIESSRAAERTGYRSARKIKYRRKLRKYETLKVLSLNRMCPLSIEEVEEWKKSGFKDYPLNPEFLKWLSTDEESNVNPYFFRDRASKHKVSLFELGRAFYHIAQRRGFLSNRLDQSAEGILEEHCPKIEAIVEDLISIDEISTNITDYFFETGILDSNEKNGYAKDLDEGDKKLVSLYKSLLAILKKNESDFENCKSEIIERLNKKDVLGKVKGKIKDISQAMLDGNYKTLGQYFYSLYSKEKIRNQYTSREEHYLSEFITICKVQGIDQINEEEKINEKKFDGLAKDLYKAIFFQRPLKSQKGLIGKCSFEKSKSRCAISHPDFEEYRMWTYLNTIKIGTQSDKKLRFLTQDEKLKLVPKFYRKNDFNFDVLAKELIEKGSSFGFYKSSKKNDFFYWFNYKPTDTVAACQVAASLKNAIGEDWKTKSFKYQTINSNKEQVSRTVDYKDLWHLLTVATSDVYLYEFAIDKLGLDEKNAKAFSKTKLKKDFASLSLSAINKILPYLKEGLLYSHAVFVANIENIVDENIWKDEKQRDYIKTQISEIIENYTLEKSRFEIINGLLKEYKSENEDGKRVYYSKEAEQSFENDLKKKLVLFYKSNEIENKEQQETIFNELLPIFIQQLKDYEFIKIQRLDQKVLIFLKGKNETGQIFCTEEKGTAEEKEKKIKNRLKKLYHPSDIEKFKKKIIKDEFGNEKIVLGSPLTPSIKNPMAMRALHQLRKVLNALILEGQIDEKTIIHIEMARELNDANKRKGIQDYQNDNKKFREDAIKEIKKLYFEDCKKEVEPTEDDILRYQLWMEQNRSEIYEEGKNISICDIIGSNPAYDIEHTIPRSRSQDNSQMNKTLCSQRFNREVKKQSMPIELNNHLEILPRIAHWKEEADNLTREIEIISRSIKAAATKEIKDKKIRRRHYLTLKRDYLQGKYDRFIWEEPKVGFKNSQIPDTGIITKYAQAYLKSYFKKVESVKGGMVAEFRKIWGIQESFIDENGMKHYKVKDRSKHTHHTIDAITIACMTKEKYDVLAHAWTLEDQQNKKEARSIIEASKPWKTFKEDLLKIEEEILVSHYTPDNVKKQAKKIVRVRGKKQFVAEVERDVNGKAVPKKAASGKTIYKLDGEGKKLPRLQQGDTIRGSLHQDSIYGAIKNPLNTDEIKYVIRKDLESIKGSDVESIVDEVVKEKIKEAIANKVLLLSSNAQQKNKLVGTVWMNEEKRIAINKVRIYANSVKNPLHIKEHSLLSKSKHVHKQKVYGQNDENYAMAIYELDGKRDFELINIFNLAKLIKQGQGFYPLHKKKEIKGKIVFVPIEKRNKRDVVLKRGQQVVFYDKEVENPKDISEIVDFKGRIYIIEGLSIQRIVRPSGKVDEYGVIMLRYFKEARKADDIKQDNFKPDGVFKLGENKPTRKMNHNQFTAFVEGIDFKVLPSGKFEKI

SEQ ID NO: 243 - protein, 933 aa, Mycoplasma iowae
SVRDYSDGPGSEKSPTPYGLWRLNKEGKVEKIGENLWDVLVGKCTIYGNDDSIKDEKTKLRGGKNSPIAEVFNFINDLTNIYLFSSSKLKLNSKTKLSILDEFNISLKTSKPIKSFSEKKLVKHIISTTEFKDINFDDVYGYRIDTSKKPLFTKLENTITIAKWLLDNNVYNELNIYDQEDLIKINNIFVILQKSMDINKRAQLVSDEYKIDLPICLELVKKIKGVMQTHSFSYKAMLEYIPVGIKYNDLETGEDTSINASTYFVDKINNLNTKLLFNGRPRKYIPKNIFEDGIISPTSKRAFIQTINVLNKIIKVYSKDYDIDNIAIELPRDKNTAEERKKISSNQKKAGEEIAEVLKFAGLNVEEYTSKLNSKTKLKLKLLKEQNYKDIYDGQEIDVIDVIKNSNKYHEEHIIPYSLCFIDSRRNKVLTKFENNKQKGNKTPFQWLSSIGKYAEFKDRVEKLFVEQKISKAKKELLLFEQDPRTEMLGFIEKNLSDTRYASKLVFDTFRDFFKVNNPNVKIKVINGALTNYARYNLFATYKDGLLERKGIMKQREFYEHHGIDATILAFLGSNHKINQLLKLSHKFKKQDDNKIYDENTGELIEFTKDFLSDEARKKAMELSKQIFEIPCKFSRPIYRKSNVSFSNETLISMKWIDDKYTKGVKINKLSLVNKDLDLNEYFADYETNEMKNLICYQEDKTLYNKLKNIYDKYNNFVENSNIKPVKNPFINYMISNFSSDDSKIQNFKHIIFYDHKGNKKFVKSLKVCGDEKNLSNIVLRKDQKDIMNSKKIKKSGILESLNPISARIYKDNKGKYITIPINSLVLNWTKKGLEIDNEKLCNILKSKNIFNNQFIEINAGQSIINNENKLFYFVGGGDFKVNKLEIKSQFCDNEIFFPRKQMNISIATIIDNYKLCEVDELGKIYNIRKIVL

SEQ ID NO: 244 - protein, 1358 aa, Acidaminococcus intestini; identical to SEQ ID NO: 108

SEQ ID NO: 245 - protein, 983 aa, Campylobacter jejuni
MARILAFDIGISSIGWAFSENDELKDCGVRIFTKAENPKTGESLALPRRLARSARKRLARRKARLNHLKHLIANEFKLNYEDYQSFDESLAKAYKGSLISPYELRFRALNELLSKQDFARVILHIAKRRGYDDIKNSDDKEKGAILKAIKQNEEKLANYQSVGEYLYKEYFQKFKENSKEFTNVRNKKESYERCIAQSFLKDELKLIFKKQREFGFSFSKKFEEEVLSVAFYKRALKDFSHLVGNCSFFTDEKRAPKNSPLAFMFVALTRIINLLNNLKNTEGILYTKDDLNALLNEVLKNGTLTYKQTKKLLGLSDDYEFKGEKGTYFIEFKKYKEFIKALGEHNLSQDDLNEIAKDITLIKDEIKLKKALAKYDLNQNQIDSLSKLEFKDHLNISFKALKLVTPLMLEGKKYDEACNELNLKVAINEDKKDFLPAFNETYYKDEVTNPVVLRAIKEYRKVLNALLKKYGKVHKINIELAREVGKNHSQRAKIEKEQNENYKAKKDAELECEKLGLKINSKNILKLRLFKEQKEFCAYSGEKIKISDLQDEKMLEIDHIYPYSRSFDDSYMNKVLVFTKQNQEKLNQTPFEAFGNDSAKWQKIEVLAKNLPTKKQKRILDKNYKDKEQKNFKDRNLNDTRYIARLVLNYTKDYLDFLPLSDDENTKLNDTQKGSKVHVEAKSGMLTSALRHTWGFSAKDRNNHLHHAIDAVIIAYANNSIVKAFSDFKKEQESNSAELYAKKISELDYKNKRKFFEPFSGFRQKVLDKIDEIFVSKPERKKPSGALHEETFRKEEFYQSYGGKEGVLKALELGKIRKVNGKIVKNGDMFRVDIFKHKKTNKFYAVPIYTMDFALKVLPNKAVARSKKGEIKDWILMDENYEFCFSLYKDSLILIQTKDMQEPEFVYYNAFTSSTVSLIVSKHDNKFETLSKNQKILFKNANEKEVIAKSIGIQNLKVFEKYIVSALGEVTKAEFRQREDFKK

SEQ ID NO: 246 - protein, 1338 aa, Streptococcus macacae
MTKPYSIGLDIGTNSVGWAVVTDGYKVPAKKMKVLGNTDKSHIKKNLLGALLFDSGNTAKDRRLKRTARRRYTRRRNRILYLQEIFAEEMAKADESFFQRLNESFLTNDDKEFDSHPIFGNKAEEEAHHHKFPTIFHLRKHLADSTEKSDLRLIYLALAHMIKFRGHFLIEGQLKAENTNVQTLFDDFVEVYDKTVEESHLSEISVSSILTEKISKSRRLENLIKYYPTEKKNTLFGNLIALSLGLQPNFKTNFKLSEDAKLQFSKDTYEEDLGELLGKIGDNYADLFISAKNLYDAILLSGILTIDDNTTKAPLSASMIKRYEEHQEDLAQLKKFIRQNLPDQYSEVFSDKTKDGYAGYIDGKTNQEAFYKYIKNMLSKTEGADYFLDKIDREDFLRKQRTFDNGSVPHQIHLQEMHAILRRQGEYYPFLKENQDKIEKILTFRIPYYVGPLARKGSRFAWAEYKADKKVTPWNFDDILDKEKSAEEFITRMTLNDLYLPEEKVLPKHSLVYETFNVYNELTKVKYVNEQGKAIFFDANMKQEIFDHVFKENRKVTKDKLLNYLNKEFEEFRIVNLTGLDKENKAFNSSLGTYHDLRKILDKSFLDDKVNEKIIEDIIQTLTLFEDREMIRQRLQKYSDIFTTQQLKKLERRHYTGWGRLSAKLINGIRDKQSNKTILGYLIDDGYSNRNFMQLINDDSLPFKEEIARAQVIGETDDLNQLVSDIAGSPAIKKGILQSLKIVDELVKVMGHNPANIVIEMARENQTTAKGRRSSQQRYKRLEEAIKNLDHDLNHKILKEHPTDNQALQNDRLFLYYLQNGRDMYTEDPLDINRLSDYDIDHIIPQSFIKDDSIDNKVLVSSAKNRGKSDNVPSEDVVNRMRPFWNKLLSCGLISQRKYSNLTKKELKPDDKAGFIKRQLVETRQITKHVAQILDARFNTKRDENKKVIRDVKIITLKSNLVSQFRKDFKFYKVREINDYHHAHDAYLNAVIGKALLDVYPQLEPEFVYGEYPHFHGYKENKATAKKFFYSNIMNFFKKDDIRTDENGEIVWKKDEHISNIKRVLSYPQVNIVKKVEIQTVGQNGGLFDDNPKSPLEVTPSKLVPLKKELNPKKYGGYQKPTTAYPVLLITDTKQLIPISVMNKKQFEQNPVKFLRDRGYQQVGKNDFIKLPKYTLVDIGDGIKRLWASSKEIHKGNQLVVSKKSQILLYHAHHLDSDLSNDYLQNHNQQFDVLFNEIISFSKKCKLGKEHIQKIENVYSNKKNSASIEELAESFIKLLGFTQLGATSPFNFLGVKLNQKQYKGKKDYILPCTEGTLIRQSITGLYETRVDLSKIGED

SEQ ID NO: 247 - protein, 1265 aa, Mycoplasma ovipneumoniae
MHNKKNITIGFDLGIASIGWAIIDSTTSKILDWGTRTFEERKTANERRAFRSTRRNIRRKAYRNQRFINLILKYKDLFELKNISDIQRANKKDTENYEKIISFFTEIYKKCAAKHSNILEVKVKALDSKIEKLDLIWILHDYLENRGFFYDLEEENVADKYEGIEHPSILLYDFFKKNGFFKSNSSIPKDLGGYSFSNLQWVNEIKKLFEVQEINPEFSEKFLNLFTSVRDYAKGPGSEHSASEYGIFQKDEKGKVFKKYDNIWDKTIGKCSFFVEENRSPVNYPSYEIFNLLNQLINLSTDLKTTNKKIWQLSSNDRNELLDELLKVKEKAKIISISLKKNEIKKIILKDFGFEKSDIDDQDTIEGRKIIKEEPTTKLEVTKHLLATIYSHSSDSNWININNILEFLPYLDAICIILDREKSRGQDEVLKKLTEKNIFEVLKIDREKQLDFVKSIFSNTKFNFKKIGNFSLKAIREFLPKMFEQNKNSEYLKWKDEEIRRKWEEQKSKLGKTDKKTKYLNPRIFQDEIISPGTKNTFEQAVLVLNQIIKKYSKENIIDAIIIESPREKNDKKTIEEIKKRNKKGKGKTLEKLFQILNLENKGYKLSDLETKPAKLLDRLRFYHQQDGIDLYTLDKINIDQLINGSQKYEIEHIIPYSMSYDNSQANKILTEKAENLKKGKLIASEYIKRNGDEFYNKYYEKAKELFINKYKKNKKLDSYVDLDEDSAKNRFRFLTLQDYDEFQVEFLARNLNDTRYSTKLFYHALVEHFENNEFFTYIDENSSKHKVKISTIKGHVTKYFRAKPVQKNNGPNENLNNNKPEKIEKNRENNEHHAVDAAIVAIIGNKNPQIANLLTLADNKTDKKFLLHDENYKENIETGELVKIPKFEVDKLAKVEDLKKIIQEKYEEAKKHTAIKFSRKTRTILNGGLSDETLYGFKYDEKEDKYFKIIKKKLVTSKNEELKKYFENPFGKKADGKSEYTVLMAQSHLSEFNKLKEIFEKYNGFSNKTGNAFVEYMNDLALKEPTLKAEIESAKSVEKLLYYNFKPSDQFTYHDNINNKSFKRFYKNIRIIEYKSIPIKFKILSKHDGGKSFKDTLFSLYSLVYKVYENGKESYKSIPVTSQMRNFGIDEFDFLDENLYNKEKLDIYKSDFAKPIPVNCKPVFVLKKGSILKKKSLDIDDFKETKETEEGNYYFISTISKRFNRDTAYGLKPLKLSVVKPVAEPSTNPIFKEYIPIHLDELGNEYPVKIKEHTDDEKLMCTIK

SEQ ID NO: 248 - protein, 1535 aa, Flavobacterium columnare
MTKILGLDLGTNSIGWAIRDTENEGINQILDKGARIFSEGVKSENGKEISRAAERTAYRSARKIKYRRKLRKYETLKVLSINGMCPLSVEEVEQWKKSGFKEYPLNPEFLDWLRTNEDKNINPYLFRDKASKQKVTLFELGRALYHIAQRRGFLSNRLDQSAEGVFEEHNPQIQNLIEDLDSSNTILNELKEYYINLGIIDETEKSGFKKDLDEGEKKLKSLYNSLVAITKKNANDIETCKQELIARLNKKEDLGKVKGKIKDISQAMLDRNFKTLGQYFFSLYNKERIRNQYTSREEHYLEEFIIICQTQGIEGINTNEKLPEKKFTGLAKDLYRAIFFQRPLKSQKGLIGKCSFEKNKSRCAVSHPDYEEFRMWSYLNTIKIGTQSEKTLRFLTLEEKLKLVPKFYRKSDFNFEVLAKELVEKGASFGYYKSSKKNEFFYWFNYKPTDSVSACVVSASLENAIGKDWKIKTFEYQTRNTEKNEVTKSVDYKDLWHLLSVATSDTYLYDFAIEKLKLEPKNAKAFSKTKLKKDFASLSLAAIAKILPYLKQGLLYSHAVFMANIENIVDADIWKDEEQQKFIQSKIVELVDNYIVEKSKLELINGLLKIYNTEDKEGRKVYYSKEAESLFEADLRKKLVPFYKANIIIEEHEQEIIFQDLFPILMDQLKKQEFIKIGRLDKQIEAFLEGENEEGQIFCNHTDKLKKLYHPSDIEVFKKKTIKDEWGNEKVVLGSPLTTSIKNPMAMRALHQLRKVLNTLIANDQIDEDTRIHIEMARELNDANKRKGIQDFQNENKKFREEAIKEIKKLYLEECHKDVNPTEDDILRYQLWLEQGKCEIYEEGNNISICDIIGSNPSYDIEHTIPRSISQDNSQMNKTLCSLKFNRSIKKQKMPVELSNYNDILPRIAHWKKEAEELTRQIETISRSIKSAATKVAKDKNIRKRHYLTLKRDYILGKYERFTWEEPKVGFKNSQIPDTGIITKYAQAYLKSYFKRVESVKGGAVAEFRKLWGIQESFIDENWWKHYKDKDRDKHTHHTIDAITIACMPKDKYDLLAHAWRLEDEQDKKAAKVLIEQAKPWKTFKEDIEKIETEILVSHFTPDNVKKQSKSIIKNRGKKVYVLKNELPVNFKNKIEGKDYFKLKFDSKILYKIPKKKEKQTDTFYEELPKNYLNGVEGKDYFKINTTGKTFYKIPIFNQGDTIRGSLHQETTYGAIKLPDIDIETKKPLHTDKGGFILKKDIKGNEIVFFVVRKEISKISENDVQNIVDNVVRKKIENAIANSLITFKIVKKKKVAVIKEGVTIWMREPNIEKGIEGIPIKKVRIITNSVKNPIEIKVHSPLSKSRHKHKQKVYGQNDENYAMALYELDGKREFELINNFNLAKLLKQSQSYYPLHKEKEIKGKKILVPIEKRNNKDVILKRGQQVVFYDKTVENPKDISEIIDFRERIYIIEGLTIQRQKDKKTSKVNEYGIIQLRHFKEARKSEEISKDNFKPDGEFKINENKPTRKMNHNQFTAFVEGIDFKVLPSGKFQKI

SEQ ID NO: 249 - protein, 1459 aa, Flavobacterium columnare
MKFNLGLDIGTNSIGWALVNEDYENKKGKIIAAGSRIIPMTQDILDKFGSGAITETQTALRTDYRSKRKLIQRFLLRRERLHRVLNVLDFLPKHYAESIDFEKYFGKFLPNTEPKLAYNQNQFIFQNSFLEMLKEFQEKHPELLTNNKKIPYDWTIYYLRKKALNQRIEKEELAWLLLQFNQKRGYNQLRDEEEESVPNKQVEFYSLKIIDVVADQPKEGRDKRWYSINLENGWTYRRESKTPLFNWEGKTKDFIVTTDLNQDGSIKKDKEGKEKRSFRAPSEGDWTLLKKKTEKEIYESGKTLGTYIYDALLNTPDLKIKGDFIRTIDRSIYKEELQQIINKQKEYHLELNSSKLYKACLEELYPKNEIYKSALKNKDIAYLFINDILYYQRPLKAPKYNIGKCTYESRTFKKEDKKIREYIPAVAKSHPLFQEFRLWQWIKNLKIYEKLSSDNCTDFFLTNEQDFENLFEFLWNKKEIDHKGILEYLVKTKFPDLKPKQVKTKVKEYRWNYVYDHEKDESKTYPCGETYFLLKNKLDKIYNAQDDFLDKERLYNLWHIIYSVTDKKQYEKALAKFALKNHLDTKSFVNTFKRIPPFKNDYAIYSLKAIKKLLPLMRVGKYWNYDDIDPITKQKIQCIITGEENDTISTLVREKTNHFSNENDFKNLPLWLAGYIVYNSHNESSEIEKWKSPQDIDTFLKKFKQHALRNPIVEQVVTETLRVVRDIWSKKGQGKKDFFNEIHIELGKDLKNPVDKRRKLSSTNTKNESTNTRIKALLIELFTQGVENVKPNSPKHQEILKIFEEGALNSGIEIEEDIIKISNTDQPTKKQLELYILWLEHKYKSPYTGQSIPLSKLFTPNYEIEHIIPRSKYYDDNLSNKVICETEINRLKNNQLGYEFINNHEIREVTLEEGKTIRLLSPEQYWNFVTTYYAKNKAKRENLLLKELPVQMVEKQLNDTRYVSKYVMQLLSKIVRKEDGTDNGINSTNILSISGKMTRALKNDWDLNDVWNDLLLYRFERLNTITKTNLFTTYSEQKQKRMPIVPDQYAKGFHKKRLDHRHHALDAIVIACITRNHINYMNNQNIQGEKLKKNAIEKENYREILQKSRLDIRAQLCEKKYNDNDPTKYNWVFIKPWADFTENTKDILESIIPSFKQNLRIINKTVNYYEKYNENGKKVKVRQIKGDNWAIRKPLHKETISGKVHLSYKTPAKGKILTATRKVLDSSMDFKSIEKITDTGIQKILKNYLEYKKSPELAFSPEGIEELNATITKYNNGFHHKPIYKVRIYEEGVKFPLGNKGNKKSKYVEAEKGTNLFFAIYKDQENNRYFETIPFNDVLETLKKGMSAVPEKNQEENTLVFALSPQDLVFVPTLDEIENPDIVDFKNLTKDQTNRIYKMVSSSGKQCFFIKAEVATSIVNKMEFSTSNKMENSIEGIQIKSNCWKLKLDRLGTITRVIK

SEQ ID NO: 250 - protein, 1389 aa, Oenococcus kitaharae
MARDYSVGLDIGTSSVGWAAIDNKYHLIRAKSKNLIGVRLFDSAVTAEKRRGYRTTRRRLSRRHWRLRLLNDIFAGPLTDFGDENFLARLKYSWVHPQDQSNQAHFAAGLLFDSKEQDKDFYRKYPTIYHLRLALMNDDQKHDLREVYLAIHHLVKYRGHFLIEGDVKADSAFDVHTFADAIQRYAESNNSDENLLGKIDEKKLSAALTDKHGSKSQRAETAETAFDILDLQSKKQIQAILKSVVGNQANLMAIFGLDSSAISKDEQKNYKFSFDDADIDEKIADSEALLSDTEFEFLCDLKAAFDGLTLKMLLGDDKTVSAAMVRRFNEHQKDWEYIKSHIRNAKNAGNGLYEKSKKFDGINAAYLALQSDNEDDRKKAKKIFQDEISSADIPDDVKADFLKKIDDDQFLPIQRTKNNGTIPHQLHRNELEQIIEKQGIYYPFLKDTYQENSHELNKITALINFRVPYYVGPLVEEEQKIADDGKNIPDPTNHWMVRKSNDTITPWNLSQVVDLDKSGRRFIERLTGTDTYLIGEPTLPKNSLLYQKFDVLQELNNIRVSGRRLDIRAKQDAFEHLFKVQKTVSATNLKDFLVQAGYISEDTQIEGLADVNGKNFNNALTTYNYLVSVLGREFVENPSNEELLEEITELQTVFEDKKVLRRQLDQLDGLSDHNREKLSRKHYTGWGRISKKLLTTKIVQNADKIDNQTFDVPRMNQSIIDTLYNTKMNLMEIINNAEDDFGVRAWIDKQNTTDGDEQDVYSLIDELAGPKEIKRGIVQSFRILDDITKAVGYAPKRVYLEFARKTQESHLTNSRKNQLSTLLKNAGLSELVTQVSQYDAAALQNDRLYLYFLQQGKDMYSGEKLNLDNLSNYDIDHIIPQAYTKDNSLDNRVLVSNITNRRKSDSSNYLPALIDKMRPFWSVLSKQGLLSKHKFANLTRTRDFDDMEKERFIARSLVETRQIIKNVASLIDSHFGGETKAVAIRSSLTADMRRYVDIPKNRDINDYHHAFDALLFSTVGQYTENSGLMKKGQLSDSAGNQYNRYIKEWIHAARLNAQSQRVNPFGFVVGSMRNAAPGKLNPETGEITPEENADWSIADLDYLHKVMNFRKITVTRRLKDQKGQLYDESRYPSVLHDAKSKASINFDKHKPVDLYGGFSSAKPAYAALIKFKNKFRLVNVLRQWTYSDKNSEDYILEQIRGKYPKAEMVLSHIPYGQLVKKDGALVTISSATELHNFEQLWLPLADYKLINTLLKTKEDNLVDILHNRLDLPEMTIESAFYKAFDSILSFAFNRYALHQNALVKLQAHRDDFNALNYEDKQQTLERILDALHASPASSDLKKINLSSGFGRLFSPSHFTLADTDEFIFQSVTGLFSTQKTVAQLYQETK

SEQ ID NO: 251 - protein, 1425 aa, Prevotella micans
MIQKIFGLDLGTNSIGSSVRNLELGENLTEQLEFFSSDIFGSSVSKNSNGREYSLAGNRSAHRRSRGLNEARRRKLWATLDLLIEHGLCPMSPDSLMQWRTYDKQKGLYRQYPIEDKDFNAWIMLDFNGDGKPDYSSPYQLRRELVVRQFDFDQPIERYKLGRALYHIAQHRGFKSSKGETIADQEKNEKKPIAEEGADIANEMKASETKLSKGLVAYMQENHLKTVGEAFAKLEDERVRIRNNESYRAIRSQYQDEIKEIFTYQKKLSVESELYERLTSEKKGVGTIFYKRPLRSQRGNVGKCTLERNKPRCPIGRPEFEEFRAWTLINNIKIRETAGEPYKQLPIKLRQELLKDCFLSKVKADFKFEDIRKYIEKRLGLSFSNDDKTINYKDSVSIAACPVTVRMKKLLGENWANCRIDGEKRRQAHGKNNNNEHIVSYTEEDIWHVCYNAEDPEEVSNFARKALHWDENKIKELVRLWTSIPQGYAMLSLKAIRNINRMLLLGLKYSDAVLLAKLPDIVPVSDEDILAITKEFLQLEDKLNQEKQINNIVNSLIANYKSKLEENRFADHNYQYQLGEGDDEDINTQIKSHIGAKLWVQIGADEQTKIFQAVRSKYQDFFKSYKRKFVESPKLGELLVAFLTEKFPNVKSKQWERLYHPSQIAIYRPIPVDNDRSKLRLGNPNIGAIKNPTVMRVLNTLRRRVNQLLDDGVISPDETRVVVETARELNDANTKWALDRYNRIRRDENEKIRKILKELNPTTNSISEQDIDKARYIFEQCETDFYTDGKVPYYNKDIKKYKLWLEQGGQCLYTGQTINLTNLFNPNAFDMEHTIPKSISFDNSDQNLTLCESYYNRFIKKNNIPTDMPNYDKDVTINGKEYTAIKPRLQRWKERVDRLSRNVDFWKGQARRAQDKDRKDECIREKHLWDMELAYWKGKLERFTMTDVTDGFKNSQLVDTRVITRHAVLYLKSIFNHVEVQRGETTAEFRKILGLQSIDEKKDRSLHSHHAIDATMLTVIPSAAKRDRMLELFYKIEETKKALKNYNDNNKTGLNLELKGLEEKLDKEKKDCRVGRRVNDLDRFINENIIVSHHTKDQALTPAHRRLRKRGKIVGGKEHPRWQTGDSLRGEIHKASYYGAITQFAKDANGKVLMKDGQAQIDPTIYYVIRRELKYKRSTQDSGFTNWEDLEKVIVDTDLFGLMKGQFPEGTSFKDACEQGFYMIKKGKNGEGDVKTHRIRHVRCKAVKTALRIKEQTYKSSKDYKQFFYAAVGDLYVMCYYTDGKKRDFKIYSLYDISNHRKSGTEDIPKFITDKKGNHLPLDYKLRTGDMVLLYKDNPEELKDLDQVNLKRRLYKVNRFESEGLIILLTHHLSTTTERGCSIGKIENYQNLPTAIRCGIKTIKFLIMGKHRDFVIRNGNIEFKH

SEQ ID NO: 252 - protein, 1473 aa, Mucilaginibacter paludis
MKNILGLDLGTNSIGWALIEKDTDQKNGNILGTGSRIIPMSQDIKDEFGKGNSISQTADRTKFRSVRRLRERHLLRRERLHRVLNVLGFLPKHYADQIDFKKRLGKLVNETEPKLVYDNKNFIFKKSFEAMLSDFNQHQPLLLADGKKVPFDWTIYYLRKKALTEKIEKEELAWLILNFNQKRGYYQLRGEEEEENPNKMVAFHSLKIVEVIADESQKGKAETWYSLILENGWIYRRSSKTPLYDWKGKQRDFIVTTDLNDDGSIKTDKEGLEKRSFRAPVEDDWTLVKKKTEQEINRSHKTVGTYIYENLLQDPKQKIKGKLVRTIEREFYKDELKMILKNQQKFHPELNDEHLYINCVRELYRNNQAHQTILSKKDFVHLFIDDIIFYQRPLRSQKSSISNCTLEFRKYKNENGTDQTDYLKAIPKSHPLFQEFRLWQWIYNLGIYQKEDDTNVTDELIKNIDGYQDLFDFLNNKKEIRQDILIKFLVEQTGLKGKPLSSVVAKYRWNFVEDKIYPCNETGTQIRTRLAKVENTPEDFLTAETEIKLWHIIYSVNDKADYEKALKTFAEKHNLDTHSFVENFKKFPPFKSEYGSFSEKAIKKLLPLIRLGKYWSWENIDKKTQERIEKILTGEFDEAIKSRVRDKAIHLTEEDHFQGLQLWLASYVVYGRHSEADNLDKWHTVADLEDYLAEFRQHSLRNPIVEQVITETLRVVKDIWLQYGQGAKDFFSEIHIELAREMKNTGDERKRLTSLVTDNENTNLRIKVLLSELLNDGNVENVRPYSPMQQEALKIFEDGVLNSDIEIEDDILKISKMAQPTNTELKRYKLWLEQKYRSPYTGQIIPLNRLFTADYEIEHIIPQSRFFDDSFSNKIICESAVNQLKDKQLGLEFIKNHSGTIVKLGMGKTAKILDVESYNEFVKGNYTKNISKRNKLMLEEIPDKMIERQLNDTRYISKFIISALSNIVRSESNDDGFNSKNVLPGNGKITSRLKQDWGMNDIWNELILPRFERMNKITDSAVFTAWNENNQKFLPIVPLEFSKGFQKKRIDHRHHALDALVIAASTREHINLLNNEHAKSDKRFDLNRKLRKFEKVAYNDPKTGKRIEKEVPTIFLKPWETFTVDAKNSLESIIVSFKQNLRVINRATNYSESYNDENGALRLGKDGNPLKEKIKQSKGDSWAIRKPMHKDFVYGKVHLQNVKLPKDKFITAIRKSLDVTFDLKRIETITDTGIQKILKNYLHSKENKVELAFSPEGIEDMNQHIERYNDGKKHQPIHKVRVFEIGSRFSLGESGNKKTKFVEAAKGTNLFFAVYQDDNKGKRNYETIPLNIVIERQKLGLHSVPTEDAKGGKLLFHLSPNDMVYVPTSEELEDNLASVNIKRLNTAQRKRIYKVEKASGVECYFIRQDIAYLIKNYDAKTKIGELESQNKLQTTMTDDRLKITDVCVKLNIDRLGSIAETFLGNQYGASKKT

SEQ ID NO: 253 - protein, 1365 aa, Filifactor alocis
MTKEYYLGLDVGTNSVGWAVTDSQYNLCKFKKKDMWGIRLFESANTAKDRRLQRGNRRRLERKKQRIDLLQEIFSPEICKIDPTFFIRLNESRLHLEDKSNDFKYPLFIEKDYSDIEYYKEFPTIFHLRKHLIESEEKQDIRLIYLALHNIIKTRGHFLIDGDLQSAKQLRPILDTFLLSLQEEQNLSVSLSENQKDEYEEILKNRSIAKSEKVKKLKNLFEISDELEKEEKKAQSAVIENFCKFIVGNKGDVCKFLRVSKEELEIDSFSFSEGKYEDDIVKNLEEKVPEKVYLFEQMKAMYDWNILVDILETEEYISFAKVKQYEKHKTNLRLLRDIILKYCTKDEYNRMFNDEKEAGSYTAYVGKLKKNNKKYWIEKKRNPEEFYKSLGKLLDKIEPLKEDLEVLTMMIEECKNHTLLPIQKNKDNGVIPHQVHEVELKKILENAKKYYSFLTETDKDGYSVVQKIESIFRFRIPYYVGPLSTRHQEKGSNVWMVRKPGREDRIYPWNMEEIIDFEKSNENFITRMTNKCTYLIGEDVLPKHSLLYSKYMVLNELNNVKVRGKKLPTSLKQKVFEDLFENKSKVTGKNLLEYLQIQDKDIQIDDLSGFDKDFKTSLKSYLDFKKQIFGEEIEKESIQNMIEDIIKWITIYGNDKEMLKRVIRANYSNQLTEEQMKKITGFQYSGWGNFSKMFLKGISGSDVSTGETFDIITAMWETDNNLMQILSKKFTFMDNVEDFNSGKVGKIDKITYDSTVKEMFLSPENKRAVWQTIQVAEEIKKVMGCEPKKIFIEMARGGEKVKKRTKSRKAQLLELYAACEEDCRELIKEIEDRDERDFNSMKLFLYYTQFGKCMYSGDDIDINELIRGNSKWDRDHIYPQSKIKDDSIDNLVLVNKTYNAKKSNELLSEDIQKKMHSFWLSLLNKKLITKSKYDRLTRKGDFTDEELSGFIARQLVETRQSTKAIADIFKQIYSSEVVYVKSSLVSDFRKKPLNYLKSRRVNDYHHAKDAYLNIVVGNVYNKKFTSNPIQWMKKNRDTNYSLNKVFEHDVVINGEVIWEKCTYHEDTNTYDGGTLDRIRKIVERDNILYTEYAYCEKGELFNATIQNKNGNSTVSLKKGLDVKKYGGYFSANTSYFSLIEFEDKKGDRARHIIGVPIYIANMLEHSPSAFLEYCEQKGYQNVRILVEKIKKNSLLIINGYPLRIRGENEVDTSFKRAIQLKLDQKNYELVRNIEKFLEKYVEKKGNYPIDENRDHITHEKMNQLYEVLLSKMKKFNKKGMADPSDRIEKSKPKFIKLEDLIDKINVINKMLNLLRCDNDTKADLSLIELPKNAGSFVVKKNTIGKSKIILVNQSVTGLYENRREL

SEQ ID NO: 254 - protein, 1130 aa, Streptococcus macedonicus
MTNGKILGLDIGIASVGVGIIEAKTGKVVHANSRLFSAANAENNAERRGFRGSRRLNRRKKHRVKRVRDLFEKYGIVTDFRNLNLNPYELRVKGLTEQLTNEELFAALRTISKRRGISYLDDAEDDSTGSTDYAKSIDENRRLLKTKTPGQIQLERLEKYGQLRGNFTVYDENGEAHRLINVFSTSDYEKEARKILETQADYNKKITAEFIDDYVEILTQKRKYYHGPGNEKSRTDYGRFRTDGTTLENIFGILIGKCNFYPDEYRASKASYTAQEYNFLNDLNNLKVPTETGKLSTEQKESLVEFAKNTAILGPAKLLKEIAKILDCKVDEIKGYREDDKGKPDLHTFEPYRKLKFNLDSVNIDYLSREVLDKLADILTLNTEREGIEDAIKRNLPNQFTEEQISEIINVRKSQSTAFNKGWHSFSAKLMNELIPELYATSDEQMTILTRLEKFKVKKKSSKNIKTIDEKEITDEIYNPVVAKSVRQTIKIINAAVKKYGDFDKIVIEMPRDKNADDEKKFINKRNKENKKEKDDALKRAAYLYNGTDKLPDEVFHGNKQLETKIRLWYQQGERCLYSGKPIPIQELVHNSNNFEIDHILPLSLSFDDSLANKVLVYSWTNQEKGQKTPYQVIDSMDAAWSFREMKEYVLKQKGLGKKKRDYLLTTENIDKIEVKKKFIERNLVDTRYASRVVLNSLQSALRELGKDTKVSVVRGQFTSQLRRKWKIDKSRETYHHHAVDALIIAASSQLKLWEKQDNPMFVDYGNNQVVDKQTGEILSVSDNEYKELVFQPPYQGFVNTISSKGFEDEILFSYQVDSKYNRKVSDATIYSTRKAKIGKDKKEETYVLGKIKDIYSQNGFDTFVKKYNKDKTQFLMYQKDPLTWENVIEVILGDYPTTKKSEDGKNDVKCNPFEEYRRENGLICKYSKKGKGTPIKSLKYYDKKLGNCIDITPEESRNKVILQSINPWRADVYFNPETLKYELMGLKYSDLSFEKGTGNYHISQEKYDAIKEKEGIGKKSEFKFTLYRNDLILIKDIASGEQEIYRFLSRTMPNVNHYVELKPYDKEKFDNVQELVEALGEADKVGRCIKSLNKPNISIYKVRTDVLGNKYFVKKEGDKPKLDFKNNKK

SEQ ID NO: 255 - protein, 1367 aa, Streptococcus pyogenes
MDKKYSIGLDIGTNSVGWAVITDDYKVPSKKFKVLGNTDRHSIKKNLIGALLFGSGETAEATRLKRTARRRYTRRKNRICYLQEIFSNEMAKVDDSFFHRLEESFLVEEDKKHERHPIFGNIVDEVAYHEKYPTIYHLRKKLADSTDKADLRLIYLALAHMIKFRGHFLIEGDLNPDNSDVDKLFIQLVQIYNQLFEENPINASRVDAKAILSARLSKSRRLENLIAQLPGEKRNGLFGNLIALSLGLTPNFKSNFDLAEDAKLQLSKDTYDDDLDNLLAQIGDQYADLFLAAKNLSDAILLSDILRVNSEITKAPLSASMIKRYDEHHQDLTLLKALVRQQLPEKYKEIFFDQSKNGYAGYIDGGASQEEFYKFIKPILEKMDGTEELLVKLNREDLLRKQRTFDNGSIPHQIHLGELHAILRRQEDFYPFLKDNREKIEKILTFRIPYYVGPLARGNSRFAWMTRKSEETITPWNFEEVVDKGASAQSFIERMTNFDKNLPNEKVLPKHSLLYEYFTVYNELTKVKYVTEGMRKPAFLSGEQKKAIVDLLFKTNRKVTVKQLKEDYFKKIECFDSVEISGVEDRFNASLGAYHDLLKIIKDKDFLDNEENEDILEDIVLTLTLFEDRGMIEERLKTYAHLFDDKVMKQLKRRRYTGWGRLSRKLINGIRDKQSGKTILDFLKSDGFANRNFMQLIHDDSLTFKEDIQKAQVSGQGHSLHEQIANLAGSPAIKKGILQTVKIVDELVKVMGHKPENIVIEMARENQTTQKGQKNSRERMKRIEEGIKELGSQILKEHPVENTQLQNEKLYLYYLQNGRDMYVDQELDINRLSDYDVDHIVPQSFIKDDSIDNKVLTRSDKNRGKSDNVPSEEVVKKMKNYWRQLLNAKLITQRKFDNLTKAERGGLSELDKAGFIKRQLVETRQITKHVAQILDSRMNTKYDENDKLIREVKVITLKSKLVSDFRKDFQFYKVREINNYHHAHDAYLNAVVGTALIKKYPKLESEFVYGDYKVYDVRKMIAKSEQEIGKATAKYFFYSNIMNFFKTEITLANGEIRKRPLIETNGETGEIVWDKGRDFATVRKVLSMPQVNIVKKTEVQTGGFSKESILPKRNSDKLIARKKDWDPKKYGGFDSPTVAYSVLVVAKVEKGKSKKLKSVKELLGITIMERSSFEKNPIDFLEAKGYKEVKKDLIIKLPKYSLFELENGRKRMLASAGELQKGNELALPSKYVNFLYLASHYEKLKGSPEDNEQKQLFVEQHKHYLDEIIEQISEFSKRVILADANLDKVLSAYNKHRDKPIREQAENIIHLFTLTNLGAPAAFKYFDTTIDRKRYTSTKEVLDATLIHQSITGLYETRIDLSQLGGD

SEQ ID NO: 256 - protein, 1233 aa, Mycoplasma canis
MEKKRKVTLGFDLGIASVGWAIVDSETNQVYKLGSRLFDAPDTNLERRTQRGTRRLLRRRKYRNQKFYNLVKRTEVFGLSSREAIENRFRELSIKYPNIIELKTKALSQEVCPDEIAWILHDYLKNRGYFYDEKETKEDFDQQTVESMPSYKLNEFYKKYGYFKGALSQPTESEMKDNKDLKEAFFFDFSNKEWLKEINYFFNVQKNILSETFIEEFKKIFSFTRDISKGPGSDNMPSPYGIFGEFGDNGQGGRYEHIWDKNIGKCSIFTNEQRAPKYLPSALIFNFLNELANIRLYSTDKKNIQPLWKLSSVDKLNILLNLFNLPISEKKKKLTSTNINDIVKKESIKSIMISVEDIDMIKDEWAGKEPNVYGVGLSGLNIEESAKENKFKFQDLKILNVLINLLDNVGIKFEFKDRNDIIKNLELLDNLYLFLIYQKESNNKDSSIDLFIAKNESLNIENLKLKLKEFLLGAGNEFENHNSKTHSLSKKAIDEILPKLLDNNEGWNLEAIKNYDEEIKSQIEDNSSLMAKQDKKYLNDNFLKDAILPPNVKVTFQQAILIFNKIIQKFSKDFEIDKVVIELAREMTQDQENDALKGIAKAQKSKKSLVEERLEANNIDKSVFNDKYEKLIYKIFLWISQDFKDPYTGAQISVNEIVNNKVEIDHIIPYSLCFDDSSANKVLVHKQSNQEKSNSLPYEYIKQGHSGWNWDEFTKYVKRVFVNNVDSILSKKERLKKSENLLTASYDGYDKLGFLARNLNDTRYATILFRDQLNNYAEHHLIDNKKMFKVIAMNGAVTSFIRKNMSYDNKLRLKDRSDFSHHAYDAAIIALFSNKTKTLYNLIDPSLNGIISKRSEGYWVIEDRYTGEIKELKKEDWTSIKNNVQARKIAKEIEEYLIDLDDEVFFSRKTKRKTNRQLYNETIYGIATKTDEDGITNYYKKEKFSILDDKDIYLRLLREREKFVINQSNPEVIDQIIEIIESYGKENNIPSRDEAINIKYTKNKINYNLYLKQYMRSLTKSLDQFSEEFINQMIANKTFVLYNPTKNTTRKIKFLRLVNDVKINDIRKNQVINKFNGKNNEPKAFYENINSLGAIVFKNSANNFKTLSINTQIAIFGDKNWDIEDFKTYNMEKIEKYKEIYGIDKTYNFHSFIFPGTILLDKQNKEFYYISSIQTVRDIIEIKFLNKIEFKDENKNQDTSKTPKRLMFGIKSIMNNYEQVDISPFGINKKIFE

SEQ ID NO: 257 - protein, 1375 aa, Lactobacillus johnsonii
MTKIKDDYIVGLDIGTDSCGWVAMNSNNDILKLQGKTAIGSRLFEGGKSAAERRLFRTTHRRIKRRRWRLKLLEEFFDPYMAEVDPYFFARLKESGLSPLDKRKTVSSIVFPTSAEDKKFYDDYPTIYHLRYKLMTEDEKFDLREVYLAIHHIIKYRGNFLYNTSVKDFKASKIDVKSSIEKLNELYENLGLDLNVEFNISNTAEIEKVLKDKQIFKRDKVKKIAELFAIKTDNKEQSKRIKDISKQVANAVLGYKTRFDTIALKEISKDELSDWNFKLSDIDADSKFEALMGNLDENEQAILLTIKELFNEVTLNGIVEDGNTLSESMINKYNDHRDDLKLLKEVIENHIDRKKAKELALAYDLYVNNRHGQLLQAKKKLGKIKPRSKEDFYKVVNKNLDDSRASKEIKKKIELDSFMPKQRTNANGVIPYQLQQLELDKIIENQSKYYPFLKEINPVSSHLKEAPYKLDELIRFRVPYYVGPLISPNESTKDIQTKKNQNFAWMIRKEEGRITPWNFDQKVDRIESANKFIKRMTTKDTYLFGEDVLPANSLLYQKFTVLNELNNIRINGKRISVDLKQEIYENLFKKHTTVTVKKLENYLKENHNLVKVEIKGLADEKKFNSGLTTYNRFKNLNIFDNQIDDLKYRNDFEKIIEWSTIFEDKSIYKEKLRSIDWLNEKQINALSNIRLQGWGRLSKKLLAQLHDHNGQTIIEQLWDSQNNFMQIVTQADFKDAIAKANQNLLVATSVEDILNNAYTSPANKKAIRQVIKVVDDIVKAASGKVPKQIAIEFTRDADENPKRSQTRGSKLQKVYKDLSTELASKTIAEELNEAIKDKKLVQDKYYLYFMQLGRDAYTGEPINIDEIQKYDIDHILPQSFIKDDALDNRVLVSRAVNNGKSDNVPVKLFGNEMAANLGMTIRKMWEEWKNIGLISKTKYNNLLTDPDHINKYKSAGFIRRQLVETSQIIKLVSTILQSRYPNTEIITVKAKYNHYLREKFDLYKSREVNDYHHAIDAYLSAICGNLLYQNYPNLRPFFVYGQYKKFSSDPDKEKAIFNKTRKFSFISQLLKNKSENSKEIAKKLKRAYQFKYMLVSRETETRDQEMFKMTVYPRFSHDTVKAPRNLIPKKMGMSPDIYGGYTNNSDAYMVIVRIDKKKGTEYKILGIPTRELVNLKKAEKEDHYKSYLKEILTPRILYNKNGKRDKKITSFEIVKSKIPYKQVIQDGDKKFMLGSSTYVYNAKQLTLSTESMKAITNNFDKDSDENDALIKAYDEILDKVDKYLPLFDINKFREKLHSGREKFIKLSLEDKKDTILKVLEGLHDNAVMTKIPTIGLSTPLGFMQFPNGVILSENAKLIYQSPTGLFKKSVKISDL

SEQ ID NO: 258 - protein, 1053 aa, Staphylococcus aureus
MKRNYILGLDIGITSVGYGIIDYETRDVIDAGVRLFKEANVENNEGRRSKRGARRLKRRRRHRIQRVKKLLFDYNLLTDHSELSGINPYEARVKGLSQKLSEEEFSAALLHLAKRRGVHNVNEVEEDTGNELSTKEQISRNSKALEEKYVAELQLERLKKDGEVRGSINRFKTSDYVKEAKQLLKVQKAYHQLDQSFIDTYIDLLETRRTYYEGPGEGSPFGWKDIKEWYEMLMGHCTYFPEELRSVKYAYNADLYNALNDLNNLVITRDENEKLEYYEKFQIIENVFKQKKKPTLKQIAKEILVNEEDIKGYRVTSTGKPEFTNLKVYHDIKDITARKEIIENAELLDQIAKILTIYQSSEDIQEELTNLNSELTQEEIEQISNLKGYTGTHNLSLKAINLILDELWHTNDNQIAIFNRLKLVPKKVDLSQQKEIPTTLVDDFILSPVVKRSFIQSIKVINAIIKKYGLPNDIIIELAREKNSKDAQKMINEMQKRNRQTNERIEEIIRTTGKENAKYLIEKIKLHDMQEGKCLYSLEAIPLEDLLNNPFNYEVDHIIPRSVSFDNSFNNKVLVKQEENSKKGNRTPFQYLSSSDSKISYETFKKHILNLAKGKGRISKTKKEYLLEERDINRFSVQKDFINRNLVDTRYATRGLMNLLRSYFRVNNLDVKVKSINGGFTSFLRRKWKFKKERNKGYKHHAEDALIIANADFIFKEWKKLDKAKKVMENQMFEEKQAESMPEIETEQEYKEIFITPHQIKHIKDFKDYKYSHRVDKKPNRELINDTLYSTRKDDKGNTLIVNNLNGLYDKDNDKLKKLINKSPEKLLMYHHDPQTYQKLKLIMEQYGDEKNPLYKYYEETGNYLTKYSKKDNGPVIKKIKYYGNKLNAHLDITDDYPNSRNKVVKLSLKPYRFDVYLDNGVYKFVTVKNLDVIKKENYYEVNSKCYEEAKKLKKISNQAEFIASFYNNDLIKINGELYRVIGVNNDLLNRIEVNMIDITYREYLENMNDKRPPRIIKTIASKTQSIKKYSTDILGNLYEVKSKKHPQIIKKG

SEQ ID NO: 259 - protein, 1063 aa, Simonsiella muelleri
MEKFHYVLGLDLGIASVGWAAIEIDKETETSIGLLDCGVRTFERAEVPKTGDSLAKARREARSTRRLIRRRSHRLLRLKRLLKREIFRQPETFKDLPINAWQLRVKGLDSRLNEYEWAAVLLHLVKHRGYLSQRKSEMSETDSKSEMGRLLAGVAENHQLLQQEQYRTPAELALKKFVKHFRNKGGDYAHTFNRLDLQAELHLLFQKQRELGNPFTSPELERQVDDLLMTQRSALQGDAILKMLGHCGFEPEQFKAAKNTFSAERFIWLTKLNNLRIQDQGKERALTADERTKLLDEPYKKSKLTYAQVRKLLSLPQTAIFKGLRYDLEHDKKAENSTLMEMKSYHNIRQTLEKSGLKTEWQSIATQPEILDAIGTAFSIYKTDEDISHELKTCRLPENVLNELLKNINFDGFIQLSLTALRKILPLMEQGYRYDEACTQIYGNHHSGSLQQESKQFLPHIPIDDVRNPVVFRTLTQARKVVNAIIRRYGSPARVHIEMARELGKSKSDRDRIEKQQQKNKKERENAVAKFKEDFPDFVGEPRGKDILKMRLYEQQHGKCLYSGHDIDINRLNEKGYVEIDHALPFSRTWDDSQNNKVLVLGSENQNKRNQTPDEYLDGANNSQRWLEFQARVQTCHFSYGKKQRIQLAKLDDETEKGFLERNLNDTRYIARFMCQFVQENLYLTGKGKRLVFASNGGMTATLRNLWGLRKVREDNDRHHALDAIVVACSTASMQQKITKAFQRHESIEYVDTETGEVKFRIPQPWDFFRQEVMIRVFSDQPCEDLVEKLSARPEALHDNVTPLFVSRAPNRKMSGQGHLETIKSAKRLSEENSMVKKPLTTLKLKDIPEIVGYPSREPQLYAALKTRLETHDDDPIKAFAKPFYKPNKNGELGALVRSVRVKGVQNTGVMVHDGKGIADNATMVRVDVYTKAGKNYLVPVYVWQVAQGILPNRAVTSGKSEADWDLIDESFEFKFSLSRGDLVEMISNKGRIFGYYNGLDRANGSIGIREHDLEKSKGKDGVHRVGVKTATAFNKYHVDPLGKEIHRCSSEPRPTLKIKSKK

SEQ ID NO: 260 - protein, 1509 aa, Psychroflexus torquis
MKRILGLDLGTNSIGWSLIEHDFKNKQGQIEGLGVRIIPMSQEILGKFDAGQSISQTADRTKYRGVRRLYQRDNLRRERLHRVLKILDFLPKHYSESIDFQDKVGQFKPKQEVKLNYRKNEKNKHEFVFMNSFIEMVSEFKNAQPELFYNKGNGEETKIPYDWTLYYLRKKALTQQITKEELAWLILNFNQKRGYYQLRGEDIDEDKNKKYMQLKVNNLIDSGAKVKGKVLYNVIFDNGWKYEKQIVNKDEWEGRTKEFIITTKTLKNGNIKRTYKAVDSEIDWAAIKAKTEQDINKANKTVGEYIYESLLDNPSQKIRGKLVKTIERKFYKEEFEKLLSKQIELQPELFNESLYKACIKELYPRNENHQSNNKKQGFEYLFTEDIIFYQRPLKSQKSNISGCQFEHKIYKQKNKKTGKLELIKEPIKTISRSHPLFQEFRIWQWLQNLKIYNKEKIENGKLEDVTTQLLPNNEAYVTLFDFLNTKKELEQKQFIEYFVKKKLIDKKEKEHFRWNFVEDKKYPFSETRAQFLSRLAKVKGIKNTEDFLNKNTQVGSKENSPFIKRIEQLWHIIYSVSDLKEYEKALEKFAEKHNLEKDSFLKNFKKFPPFVSDYASYSKKAISKLLPIMRMGKYWSESAVPTQVKERSLSIMERVKVLPLKEGYSDKDLADLLSRVSDDDIPKQLIKSFISFKDKNPLKGLNTYQANYLVYGRHSETGDIQHWKTPEDIDRYLNNFKQHSLRNPIVEQVVMETLRVVRDIWEHYGNNEKDFFKEIHVELGREMKSPAGKREKLSQRNTENENTNHRIREVLKELMNDASVEGGVRDYSPSQQEILKLYEEGIYQNPNTNYLKVDEDEILKIRKKNNPTQKEIQRYKLWLEQGYISPYTGKIIPLTKLFTHEYQIEHIIPQSRYYDNSLGNKIICESEVNEDKDNKTAYEYLKVEKGSIVFGHKLLNLDEYEAHVNKYFKKNKTKLKNLLSEDIPEGFINRQLNDSRYISKLVKGLLSNIVRENGEQEATSKNLIPVTGVVTSKLKQDWGLNDKWNEIIAPRFKRLNKLTNSNDFGFWDNDINAFRIQVPDSLIKGFSKKRIDHRHHALDALVVACTSRNHTHYLSALNAENKNYSLRDKLVIKNENGDYTKTFQIPWQGFTIEAKNNLEKTVVSFKKNLRVINKTNNKFWSYKDENGNLNLGKDGKPKKKLRKQTKGYNWAIRKPLHKETVSGIYNINAPKNKIATSVRTLLTEIKNEKHLAKITDLRIRETILPNHLKHYLNNKGEANFSEAFSQGGIEDLNKKITTLNEGKKHQPIYRVKIFEVGSKFSISEDENSAKSKKYVEAAKGTNLFFAIYLDEENKKRNYETIPLNEVITHQKQVAGFPKSERLSVQPDSQKGTFLFTLSPNDLVYVPNNEELENRDLFNLGNLNVEQISRIYKFTDSSDKTCNFIPFQVSKLIFNLKKKEQKKLDVDFIIQNEFGLGSPQSKNQKSIDDVMIKEKCIKLKIDRLGNISKA

SEQ ID NO: 261 - protein, 1112 aa, Staphylococcus simulans
MLVGLKFKQSILFENMENAEDIKESATGSDAISLSDDYYENLSEFLTDEQLNFIESANTFFMGIMLDRILKGATSISAAKVRDYKIFKSQLKLIKDIVYQNKYDKYHEFFVTSKEDMRAYQENPDAKNFGKLSKFDQYLIHSKDQYAKLMKDLKGLVPKEYTEVLNLIDEQKFLVVQNTTDNASIPYQNNVFEAENILRNQQKYYPEITEEMIGKVINLISFRIPYYVGPLTNKNGQSDFAWMIRKSDEQTLPWNFDKVIDKSKSAEKFIRRMTSKCTYLLEEDVLPKHSLLYQEMEVLNELNNVQLRGENEPKHRIHRLDPKVKQFIYHNLFQKKKNVTHKDLITLLQNSEHRNTLNKTSGQKLKVFGTQNDSKFASKLSTYNDMKAILGSVENKRQMIEELVLWITIFEDKAILKQKIGEKYPNITEKQLNQIVKLNYSGWGRLSEKLLTKEVNGRSLIDLMYSTENNFMEIITDKTLGFDCFIKNSNKVKNAKISYKDVAELRTSPALKKGIWNAIKMVREISNLFGAPEKIIIEFATEDQAKGKRQKSRSELWDDLVKKNNLKRNKEFEGLFEELKAYPDLDFSNPKLWLYIHQNGKCMYTKKPIDLERLMSDTNNQLYEIDHILPRTFVKDDSINNKVLVIQSANQKKSGDKMPLEIFDNHVLVPFWKMLYENDLISSSKLSKLMKKEFNDLDKEGFIQRQLVETRQIISHVSDFLTEEYPSTTVVPMKANVVSELRRKFDIPKIRQLNDWHHAVDAYLNGFVYQAARVFYPKVNLFEFNFKWEKVREKWRQLGEFTENNKKREFFLFKRMENYVNEYGEGMISKLIFDLDNFKFNYSRKVESTESAFYKQSAFSPKNTTAQYDSDKNKTAIYKEMKNKRGIVVSYTYVKKDQELIGYGVFNETVFEYVNNADVDMNTRALKIVRKAFPKLDIKKAQYLFSINKGDALLVNGHPFLFVSAYERINGKQLEFDIAMQRKIKQALSPYNNMTEQEKVEFYNQFAEKVIEEFRNSIGLQSRDRKVNLIKNLFNNTEKSNDSMTQSILEVLKMTKVSAERSKELKIRWNGQTPNTFIDTKNNAEIQYKSITGLKTTKPKSIFKLAESKNEL

SEQ ID NO: 262 - protein, 1274 aa, Mycoplasma gallisept
MNINMNNSIKSKPEVTIGLDLGVGSVGWAIVDNETNIIHHLGSRLFSQAKTAEDRRSFRGVRRLIRRRKYKLKRFVNLIWKYNSYFGFKNKEDILNNYQEQQKLHNTVLNLKLEALNAKIDPKALSWILHDYLKNRGHFYEDNRDFNVYPTEELANYFDEFGYYKGIIDSKNDDDDKLEEGLTKYKFSNQHWLEEVKKVLSNQTGLPEKFKEEYESLFSYVRNYSEGPGSINSVSPYGIYHLDEKEGKVVQKYNNIWDKTIGKCSIFPDEYRAPKNSPIAMIFNEINELSTIRSYSIYLTGWFINQEFKKAYLNKLLDLLIKTNSEKPIDARQFKKLREETIAESIGKETLKDVESEEKLEKDDHKWKLKGLKLNTNGKIQYNDLSSLAKFVHKLKQHLKLDFLLEDQYTPLDKINFLQSLYVYLGKHLRYSNRVDSANLKEFSDSSRLFERVLQEQKDGLFKLFEQTDKDDEKILTQTHSLSTKAMLLAITRMTNLDNDEDNQKNNDKGWNFEAIKNFDQKFIDITKTNNNLSLKQDKRYLDDQFINDAILSPGVKRILREATKVFNAILKQFSEEYDVTKVVIELARELSEEKELENTKNYKKLIKKNGDKISEGLKALGIAEDKIEEILKSPTKSYKVLLWLQQDHIDPYSQKEIAFDDILTKTEKTEIDHIIPYSISFDDSSSNKLLVLAESNQAKSNQTPYEFINSGKAEITWEVYEAYCHKFKNGDSSLLDSTQRSKKFAKMMKTDTSSKYDIGFLARNLNDTRYATIVFRDALKDYANNHLVEDKPMFKVVCINGGVTSFLRKNFDPKSWYAKKDRDKNIHHAVDASIISIFSNETKTLFNQLTKFADYKLFKNTDGSWKKIDPKTGVVSEVTDENWKQIRVRNQVSEIAKVIDKYIQDSNIERKARYSRKIENKTNISLFNDTVYSAKKVGYEDQIKRKNLKTLDIHESAEENKNSKVKKQFVYRKLVNVSLLNNDKLADLFAEKEDILMYRANPWVINLAEQIFNEYTENKKIKSQNVFEKYMLDLTKEFPEKFSEAFVKSMIRNKTAIIYNVEKDVVHRIKRLKILSSELKENKWSNVIIRSKNESGTKLSYQDTINSIALMIMRSIDPTAKKQYIRVPLNTLNLHLGDQDFDLHNIDAYLKKPKFVKYLKANEIGDEYKPWRVLTSGTLLIHKKDKKLMYISSFQNLNDLIEIKNLIETEYKENVDSDPKKKKKASQILRSLSVILNDYILLDAKYNFDILGLSKNKIDEILNSKLDLDKIAK

SEQ ID NO: 263 - protein, 1122 aa, Artificial Sequence; identical to SEQ ID NO: 32
  Synthetic sequence

SEQ ID NO: 264 - protein, 1236 aa, Artificial Sequence; identical to SEQ ID NO: 30
  Synthetic sequence

SEQ ID NO: 265 - protein, 1059 aa, Artificial Sequence; identical to SEQ ID NO: 24
  Synthetic sequence

SEQ ID NO: 266 - protein, 1166 aa, Artificial Sequence; identical to SEQ ID NO: 48
  Synthetic sequence

SEQ ID NO: 267 - protein, 1149 aa, Artificial Sequence; identical to SEQ ID NO: 46
  Synthetic sequence

SEQ ID NO: 268 - protein, 1314 aa, Artificial Sequence; identical to SEQ ID NO: 36
  Synthetic sequence

SEQ ID NO: 269 - protein, 1064 aa, Artificial Sequence; identical to SEQ ID NO: 47
  Synthetic sequence

SEQ ID NO: 270 - protein, 1401 aa, Artificial Sequence
  Synthetic sequence
MDKKYSIGLDIGTNSVGWAVITDEYKVPSKKFKVLGNTDRHSIKKNLIGALLFDSGETAEATRLKRTARRRYTRRKNRICYLQEIFSNEMAKVDDSFFHRLEESFLVEEDKKHERHPIFGNIVDEVAYHEKYPTIYHLRKKLVDSTDKADLRLIYLALAHMIKFRGHFLIEGDLNPDNSDVDKLFIQLVQTYNQLFEENPINASGVDAKAILSARLSKSRRLENLIAQLPGEKKNGLFGNLIALSLGLTPNFKSNFDLAEDAKLQLSKDTYDDDLDNLLAQIGDQYADLFLAAKNLSDAILLSDILRVNTEITKAPLSASMIKRYDEHHQDLTLLKALVRQQLPEKYKEIFFDQSKNGYAGYIDGGASQEEFYKFIKPILEKMDGTEELLVKLNREDLLRKQRTFDNGSIPHQIHLGELHAILRRQEDFYPFLKDNREKIEKILTFRIPYYVGPLARGNSRFAWMTRKSEETITPWNFEEVVDKGASAQSFIERMTNFDKNLPNEKVLPKHSLLYEYFTVYNELTKVKYVTEGMRKPAFLSGEQKKAIVDLLFKTNRKVTVKQLKEDYFKKIECFDSVEISGVEDRFNASLGTYHDLLKIIKDKDFLDNEENEDILEDIVLTLTLFEDREMIEERLKTYAHLFDDKVMKQLKRRRYTGWGRLSRKLINGIRDKQSGKTILDFLKSDGFANRNFMQLIHDDSLTFKEDIQKAQVSGQGDSLHEHIANLAGSPAIKKGILQTVKVVDELVKVMGRHKPENIVIEMARENQTTQKGQKNSRERMKRIEEGIKELGSQILKEHPVENTQLQNEKLYLYYLQNGRDMYVDQELDINRLSDYDVDHIVPQSFLKDDSIDNKVLTRSDKNRGKSDNVPSEEVVKKMKNYWRQLLNAKLITQRKFDNLTKAERGGLSELDKAGFIKRQLVETRQITKHVAQILDSRMNTKYDENDKLIREVKVITLKSKLVSDFRKDFQFYKVREINNYHHAHDAYLNAVVGTALIKKYPKLESEFVYGDYKVYDVRKMIAKSEQEIGKATAKYFFYSNIMNFFKTEITLANGEIRKRPLIETNGETGEIVWDKGRDFATVRKVLSMPQVNIVKKTEVQTGGFSKESILPKRNSDKLIARKKDWDPKKYGGFDSPTVAYSVLVVAKVEKGKSKKLKSVKELLGITIMERSSFEKNPIDFLEAKGYKEVKKDLIIKLPKYSLFELENGRKRMLASAGELQKGNELALPSKYVNFLYLASHYEKLKGSPEDNEQKQLFVEQHKHYLDEIIEQISEFSKRVILADANLDKVLSAYNKHRDKPIREQAENIIHLFTLTNLGAPAAFKYFDTTIDRKRYTSTKEVLDATLIHQSITGLYETRIDLSQLGGDAYPYDVPDYASLGSGSPKKKRKVEDPKKKRKVD

SEQ ID NO: 271 - protein, 1368 aa, Artificial Sequence
  Synthetic sequence
MDKKYSIGLAIGTNSVGWAVITDDYKVPSKKLKGLGNTDRHGIKKNLIGALLFDSGETAEATRLKRTARRRYTRRKNRICYLQEIFSNEMAKVDDSFFHRLEESFLVEEDKKHERHPIFGNIVDEVAYHEKYPTIYHLRKKLADSTDKVDLRLIYLALAHMIKFRGHFLIEGDLNPDNSDVDKLFIQLVQTYNQLFEENPINASRVDAKAILSARLSKSRRLENLIAQLPGEKKNGLFGNLIALSLGLTPNFKSNFDLAEDAKLQLSKDTYDDDLDNLLAQIGDQYADLFLAAKNLSDATLLSDILRVNSEITKAPLSASMIKRYDEHHQDLTLLKALVRQQLPEKYKEIFFDQSKNGYAGYIDGGASQEEFYKFIKPILEKMDGTEELLAKLNREDLLRKQRTFDNGSIPYQIHLGELHAILRRQEDFYPFLKDNREKIEKILTFRIPYYVGPLARGNSRFAWMTRKSEETITPWNFEEVVDKGASAQSFIERMTNFDKNLPNEKVLPKHSLLYEYFTVYNELTKVKYVTEGMRKPAFLSGEQKKAIVDLLFKTNRKVTVKQLKEDYFKKIECFDSVEISGVEDRFNASLGTYHDLLKIIKDKDFLDNEENEDILEDIVLTLTLFEDREMIEERLKTYAHLFDDKVMKQLKRRRYTGWGRLSRKLINGIRDKQSGKTILDFLKSDGFANRNFMQLIHDDSLTFKEDIQKAQVSGQGDSLHEHIANLAGSPAIKKGILQTVKVVDELVKVMGRHKPENIVIEMARENQTTQKGQKNSRERMKRIEEGIKELGSDILKEYPVENTQLQNEKLYLYYLQNGRDMYVDQELDINRLSDYDVDHIVPQSFLKDDSIDNKVLTRSDKNRGKSDNVPSEEVVKKMKNYWRQLLNAKLITQRKFDNLTKAERGGLSELDKVGFIKRQLVETRQITKHVAQILDSRMNTKYDENDKLIREVRVITLKSKLVSDFRKDFQFYKVREINNYHHAHDAYLNAVVGTALIKKYPKLESEFVYGDYKVYDVRKMIAKSEQEIGKATAKYFFYSNIMNFFKTEITLANGEIRKRPLIETNGETGEIVWDKGRDFATVRKVLSMPQVNIVKKTEVQTGGFSKESILPKRNSDKLIARKKDWDPKKYGGFDSPTVAYSVLVVAKVEKGKSKKLKSVKELLGITIMERSSFEKDPIDFLEAKGYKEVRKDLIIKLPKYSLFELENGRKRMLASAGELQKGNELALPSKYVNFLYLASHYEKLKGSPEDNEQKQLFVEQHKHYLDEIIEQISEFSKRVILADANLDKVLSAYNKHRDKPIREQAENIIHLFTLTNLGAPAAFKYFDTTIDRKRYTSTKEVLDATLIHQSITGLYETRIDLSQLGGD

SEQ ID NO: 272 - protein, 1368 aa, Artificial Sequence
  Synthetic sequence
MDKKYSIGLDIGTNSVGWAVITDDYKVPSKKLKGLGNTDRHGIKKNLIGALLFDSGETAEATRLKRTARRRYTRRKNRICYLQEIFSNEMAKVDDSFFHRLEESFLVEEDKKHERHPIFGNIVDEVAYHEKYPTIYHLRKKLADSTDKVDLRLIYLALAHMIKFRGHFLIEGDLNPDNSDVDKLFIQLVQTYNQLFEENPINASRVDAKAILSARLSKSRRLENLIAQLPGEKKNGLFGNLIALSLGLTPNFKSNFDLAEDAKLQLSKDTYDDDLDNLLAQIGDQYADLFLAAKNLSDATLLSDILRVNSEITKAPLSASMIKRYDEHHQDLTLLKALVRQQLPEKYKEIFFDQSKNGYAGYIDGGASQEEFYKFIKPILEKMDGTEELLAKLNREDLLRKQRTFDNGSIPYQIHLGELHAILRRQEDFYPFLKDNREKIEKILTFRIPYYVGPLARGNSRFAWMTRKSEETITPWNFEEVVDKGASAQSFIERMTNFDKNLPNEKVLPKHSLLYEYFTVYNELTKVKYVTEGMRKPAFLSGEQKKAIVDLLFKTNRKVTVKQLKEDYFKKIECFDSVEISGVEDRFNASLGTYHDLLKIIKDKDFLDNEENEDILEDIVLTLTLFEDREMIEERLKTYAHLFDDKVMKQLKRRRYTGWGRLSRKLINGIRDKQSGKTILDFLKSDGFANRNFMQLIHDDSLTFKEDIQKAQVSGQGDSLHEHIANLAGSPAIKKGILQTVKVVDELVKVMGRHKPENIVIEMARENQTTQKGQKNSRERMKRIEEGIKELGSDILKEYPVENTQLQNEKLYLYYLQNGRDMYVDQELDINRLSDYDVDAIVPQSFLKDDSIDNKVLTRSDKNRGKSDNVPSEEVVKKMKNYWRQLLNAKLITQRKFDNLTKAERGGLSELDKVGFIKRQLVETRQITKHVAQILDSRMNTKYDENDKLIREVRVITLKSKLVSDFRKDFQFYKVREINNYHHAHDAYLNAVVGTALIKKYPKLESEFVYGDYKVYDVRKMIAKSEQEIGKATAKYFFYSNIMNFFKTEITLANGEIRKRPLIETNGETGEIVWDKGRDFATVRKVLSMPQVNIVKKTEVQTGGFSKESILPKRNSDKLIARKKDWDPKKYGGFDSPTVAYSVLVVAKVEKGKSKKLKSVKELLGITIMERSSFEKDPIDFLEAKGYKEVRKDLIIKLPKYSLFELENGRKRMLASAGELQKGNELALPSKYVNFLYLASHYEKLKGSPEDNEQKQLFVEQHKHYLDEIIEQISEFSKRVILADANLDKVLSAYNKHRDKPIREQAENIIHLFTLTNLGAPAAFKYFDTTIDRKRYTSTKEVLDATLIHQSITGLYETRIDLSQLGGD

SEQ ID NO: 273 - protein, 1368 aa, Artificial Sequence
  Synthetic sequence
MDKKYSIGLAIGTNSVGWAVITDDYKVPSKKLKGLGNTDRHGIKKNLIGALLFDSGETAEATRLKRTARRRYTRRKNRICYLQEIFSNEMAKVDDSFFHRLEESFLVEEDKKHERHPIFGNIVDEVAYHEKYPTIYHLRKKLADSTDKVDLRLIYLALAHMIKFRGHFLIEGDLNPDNSDVDKLFIQLVQTYNQLFEENPINASRVDAKAILSARLSKSRRLENLIAQLPGEKKNGLFGNLIALSLGLTPNFKSNFDLAEDAKLQLSKDTYDDDLDNLLAQIGDQYADLFLAAKNLSDATLLSDILRVNSEITKAPLSASMIKRYDEHHQDLTLLKALVRQQLPEKYKEIFFDQSKNGYAGYIDGGASQEEFYKFIKPILEKMDGTEELLAKLNREDLLRKQRTFDNGSIPYQIHLGELHAILRRQEDFYPFLKDNREKIEKILTFRIPYYVGPLARGNSRFAWMTRKSEETITPWNFEEVVDKGASAQSFIERMTNFDKNLPNEKVLPKHSLLYEYFTVYNELTKVKYVTEGMRKPAFLSGEQKKAIVDLLFKTNRKVTVKQLKEDYFKKIECFDSVEISGVEDRFNASLGTYHDLLKIIKDKDFLDNEENEDILEDIVLTLTLFEDREMIEERLKTYAHLFDDKVMKQLKRRRYTGWGRLSRKLINGIRDKQSGKTILDFLKSDGFANRNFMQLIHDDSLTFKEDIQKAQVSGQGDSLHEHIANLAGSPAIKKGILQTVKVVDELVKVMGRHKPENIVIEMARENQTTQKGQKNSRERMKRIEEGIKELGSDILKEYPVENTQLQNEKLYLYYLQNGRDMYVDQELDINRLSDYDVDAIVPQSFLKDDSIDNKVLTRSDKNRGKSDNVPSEEVVKKMKNYWRQLLNAKLITQRKFDNLTKAERGGLSELDKVGFIKRQLVETRQITKHVAQILDSRMNTKYDENDKLIREVRVITLKSKLVSDFRKDFQFYKVREINNYHHAHDAYLNAVVGTALIKKYPKLESEFVYGDYKVYDVRKMIAKSEQEIGKATAKYFFYSNIMNFFKTEITLANGEIRKRPLIETNGETGEIVWDKGRDFATVRKVLSMPQVNIVKKTEVQTGGFSKESILPKRNSDKLIARKKDWDPKKYGGFDSPTVAYSVLVVAKVEKGKSKKLKSVKELLGITIMERSSFEKDPIDFLEAKGYKEVRKDLIIKLPKYSLFELENGRKRMLASAGELQKGNELALPSKYVNFLYLASHYEKLKGSPEDNEQKQLFVEQHKHYLDEIIEQISEFSKRVILADANLDKVLSAYNKHRDKPIREQAENIIHLFTLTNLGAPAAFKYFDTTIDRKRYTSTKEVLDATLIHQSITGLYETRIDLSQLGGD

SEQ ID NO: 274 - protein, 240 aa, Acetobacter aceti
MANIAENLVFGIDLGIGSCGWAVLNQKAKDENIVALGSWCFDVPETDKERIPTNQIRRANRLLRRVIRRRRNRMAEIRRLFASKGMLDTADPDALAKISADPWEMRAKGLDYQLTPQEFAVALGHIAKRRGFKSAAKRVSTNAPSEDSKMLAALEKTKEQSAQYRTIGEMFARDPAYADRRRNRDGCFDRTMSREDLFKETQILFESQRRLGNFSATSETEQAFIDIAFRQKPMQDSERL

SEQ ID NO: 275 - protein, 400 aa, Acetobacter aceti
SFERFRLLCRLVNLRVTDGLEDRPLTPEELRLACEDAGKTRKLSVKKVRSLIGLRDDQRFTTIPPDQEQHDIAARTGDALTGTATFRAILGESFWRQLLPHPEQLDRAAWIISFHELTDTIISKLATIGLPSEVMELIRKALEDGKFSKFKGAASLSDKAARKLIPFLQEGLTYDKACQKAGYNHAASKFTHYDSIDTKAKFNSLMDDVRDSITNPVARKAISEGMKQVWAMRNQWGLPGAICIELARDVGNSAEKRREIESGIKKNTAQRERERQEAKEHLNQSDISSETLLRYRLWKEQGGRCCYTDQPITPSQLIASDNSVQVDHILPWSRFGDDSYLNKALCTAKANQEKKNRTPWEWIHNQKGVEAWNHFTAAVESRKETRGLKKRNFLLKSSKE

SEQ ID NO: 276 - protein, 376 aa, Acetobacter aceti
YAARVMAEAVRLLYPSGNRAEKGGVKRVFTRPGALTAALRHAWGVESLKKINGKRLNDDRHHALDAAVVAAVSEKEIQKLTKSFQICEQKGLARPMRDVPMPWEGFRHQLETAYADIRVARPERRRARGKGHDATIRQLREEKDGPVVYERRAISDLKLTDLERIKDPERNSAIISSLRTWIEKGKPADYPPQSPKGDEIRKIRVMSRNKPAVSVRGGTADRGEMTRVDVFTKMGKKGKPEWFLVPIYRHQVIDRIQWPQPPNQAAANGKSEKNWPTMGLEHEFRFSLYPRSYVQIVKRDGEIIEGYFAGLDRTVAAFSLLSSSDPTSIQRGIGAKTLESIRKYNVNRFGDISMVEQETRTWHGDVCISPDQPDSA

SEQ ID NO: 277 - protein, 1054 aa, Actinobacillus suis
MKLTPLNYILGLDLGIASVGWAVVEIDEQENPLGLIDVGVRTFDRAEVPKTGESLALARRLARSARRLVKRRADRIKKAKRLLKAENILLSADEHLPNDVWQLRVKGLDQKLERQEWAAVLLHLLKHRGYLSQRKNESKSENKELGALLSGVETNHQILQSAEYRTPAEIAVKKFHVEDGHIRNQRGAYTHTFSRLDLLAEMELLFQRQTDLGNPHTSAKLLENLTALLMWQKPALAGEAILKMLGKCTFEPTEYKAAKNSYSAERFVWLTKLNNLRILEQGAERALTDNERFALLDQPYEKAKFTYAQARTMLALPDEAIFKGVRYQGEDKKAVETKTILMEMKAYHQIRKALENADLKAEWNELKNNSELLDDIGTAFSLHKTDEDICRYLDGKLSESILNALLENLNFDKFIQLSLKALQQILPLMLQGQRYDEAVSAIYGDHYGKKSAEINRLLPTIPADEIRNPVVLRTLTQARKVINAVVRLYGSPARIHIETGREVGKSYQDRKKLEKQQEDNRKQRESAVKKFKEYFPNFVGEPKGKDILKMRLYELQQAKCLYSGKSLELHRLLEKGYVEVDHALPFSRTWDDSFNNKVLVLANENQNKGNLTPYEWLDGKNNSEHWQNFVARVQTSGFSHTKKQRILSHKLDEKGFIERNLNDTRYVARFLCNFIADNMLLTGKGKRKVFASNGQITALLRGRWGLQKVRDDNDRHHALDAVVVACSTVVMQQKITRFVRYEEGNVFSGERIDRETGEIIPLHFPSPWAFFRENVEIRIFSENPKLELENRLPDYPQYNHEFVQPLFVSRMPTRKMTGQGHMETVKSAKRLDEGLSVLKVPLTQLKLSDLERMVNREREVTLYESLKARLEQFGNDPAKAFAEPFHKKGGAVVKAVRVEQTQKSGVLVRDGNGVADNASMVRVDVFTKGGKYFLVPIYTWQVAKGILPNKAVTANVDEIDWLEMDESYQFIFTMYPNDLVKVKLKKEEFFGYYGGLDRATGAIVIKEHDLEKSKGKQGIYRIGVKLALSFEKYQVDELGKNIRPCRPTKRQHVR

SEQ ID NO: 278 - protein, 239 aa, Actinobacillus ureae
MEIRIFSENPKLGLENRLPGYPQYNHEFVQPLFVSRMPTRKMTGKGHMETVKSAKRLDEGLSVLKVPLTQLKLSDLERMVNREREDALYQSLKAHLEQFGNDPAKAFAEPFHKKGGTVVKAVRVEQTQKSGVLVRDGNGVADNTSMVRVDVFTKAGKYFLVPIYKWQVAKRILPNKAVTAGVDEIDWLEMDSSYQFIFTMYANDLVKVKLKKRSILGLLRWFRSCNWGYCYQRTRFREI

SEQ ID NO: 279 - protein, 400 aa, Actinobacillus ureae
MKLTPLNYILGLDLGIASVGWAVVEIDEQENPLGLIDVGVRTFDRAEVAKTGESLALARRLARSSRRLVKRRADRIKKAKRLLKAENLLLSADEILPNDVWQLRVKGLDQKLERQEWAAVLLHILKHRGYLSQRKNESKSENKELGALLSGVATNHQLLQTAEYRTPAEITVKKFQAEENGHGHIRNQRGDYSHTFDRKDLLAEMKLLFQRQAELGNPHTSEKLLENLTTLLLWQKPALAGEAILKMLGKCTFEPAEYKAAKNSYSAERFVWLTKLNNLRILENGIERALTDNERFTLLDQPYEKAKLTYAQARTMLALSDEAIFKGVRYQGEDKKAAEKVALIEMKGYQHIRKALEGAGLKAEWNELKNNSELLDDIGTAFSLYFSISNLPTEIAYFTP

SEQ ID NO: 280 - protein, 1113 aa, Actinomyces georgiae
MSASSQNVERIRYKVGIDVGLRSIGFCAVQVDADDRPVKLLNTVVHVHDAGVSPADAKKADTRKLVSGVARRTRRLYRTRKRRLVDLDRQLDGLGWPLVDPARFADPREPWFAREKLVSGRVDDADERKELLSVALRHIAHHRGWRNPYSTVESLQADAPPSEFLQGLNQRVSEKLGTELDPGLTQGQLVAKLLHRFPNAKIRGPEGILRGKLHQSDNAGELRLICRTQGLDCHITEELVRLVFQAKSPKANKEMRKRIGRDQLPGQGAHIRAEKAHPVFQRFRIVAVLANLRIREAHVDRRLTAEEMRTLTDFLLGLAGSEQPTWEELADNLNIERHQLRGTAKASVDGAPALRFPPIDATTDRIYASKLKWLAEWWRQADEERRGYMVDALSNSGGSEDEPYLDDEIAEMLEQASEEDQAKLDSLHLPGGRASYCLDTLRRLTDAMLGGGLDLFEARKAVFHVDDDWAPPTDPIGAPVGNPPVDRVLKHVARWLEAATGRWGAPQTINIEHVREGLGSEKAARELTRMNDRRRRNNQKLVEEMGEKLGMSGRIRRSDRMRYEAIRRQNCECLYCGQPITYQTMEMDHIVPRAGAASTNSRSNLAAVCRRCNHQKGKLPFAVWAESQDSPAEVRLQDAVQRVRHWLRDAGMGQKELQALRVQVIARLKSKRPDEEFDGRSMESIAWMANELRARVEAQYRGSGTTVRVYRGALTAEARKASGFEGRVNLIGGRGKDRFDRRHHAMDALVIALMNQSVAQTLALRLNMRDSQWLTQSEQTWRQFHGAPGEAARKWEAWDRDMRDASDLFNLALDGGRIPITENVRLRVGNGRVHEDGVIRFKPEYEVKGKTIKGGEARLLGDSLPSEQIDRAETPALWTALTRLPEYDRKSGLPENPDRVIRVNGAVVQATDRIRFFGTPASVAVRGGYAKLGESIHHARIYRINGKTPKYAMIRVYTIDLMRLNHEDIFTAVLKPSTISMRCAEKKLKYAIAEGNAEQIGWLVEGDQLELDAAAYAKGVGADLMREYPMATCWRVAGFPDEAKLRLRPVLLAAEGMGEDAPKFMREVLENQGWRPAVNALLSPGSVRVVRRNVLGEPRFKSSGHLPTTVDLV

SEQ ID NO: 281 - protein, 1101 aa, Actinomyces naeslundii
MWYASLMSAHHLRVGIDVGTHSVGLATLRVDDHGTPIELLSALSHIHDSGVGKEGKKDHDTRKKLSGIARRARRLLHHRRTQLQQLDEVLRDLGFPIPTPGEFLDLNEQTDPYRVWRVRARLVEEKLPEELRGPAISMAVRHIARHRGWRNPYSKVESLLSPAEESPFMKALRERILATTGEVLDDGITPGQAMAQVALTHNISMRGPEGILGKLHQSDNANEIRKICARQGVSPDVCKQLLRAVFKADSPRGSAVSRVAPDPLPGQGSFRRAPKCDPEFQRFRIISIVANLRISETKGENRPLTADERRHVVTFLTEDSQADLTWVDVAEKLGVHRRDLRGTAVHTDDGERSAARPPIDATDRIMRQTKISSLKTWWEEADSEQRGAMIRYLYEDPTDSECAEIIAELPEEDQAKLDSLHLPAGRAAYSRESLTALSDHMLATTDDLHEARKRLFGVDDSWAPPAEAINAPVGNPSVDRTLKIVGRYLSAVESMWGTPEVIHVEHVRDGFTSERMADERDKANRRRYNDNQEAMKKIQRDYGKEGYISRGDIVRLDALELQGCACLYCGTTIGYHTCQLDHIVPQAGPGSNNRRGNLVAVCERCNRSKSNTPFAVWAQKCGIPHVGVKEAIGRVRGWRKQTPNTSSEDLTRLKKEVIARLRRTQEDPEIDERSMESVAWMANELHHRIAAAYPETTVMVYRGSITAAARKAAGIDSRINLIGEKGRKDRIDRRHHAVDASVVALMEASVAKTLAERSSLRGEQRLTGKEQTWKQYTGSTVGAREHFEMWRGHMLHLTELFNERLAEDKVYVTQNIRLRLSDGNAHTVNPSKLVSHRLGDGLTVQQIDRACTPALWCALTREKDFDEKNGLPAREDRAIRVHGHEIKSSDYIQVFSKRKKTDSDRDETPFGAIAVRGGFVEIGPSIHHARIYRVEGKKPVYAMLRVFTHDLLSQRHGDLFSAVIPPQSISMRCAEPKLRKAITTGNATYLGWVVVGDELEINVDSFTKYAIGRFLEDFPNTTRWRICGYDTNSKLTLKPIVLAAEGLENPSSAVNEIVELKGWRVAINVLTKVHPTVVRRDALGRPRYSSRSNLPTSWTIE

SEQ ID NO: 282 - protein, 1181 aa, Actinomyces sp.
MLHCIAVIRVPPSEEPGFFETHADSCALCHHGCMTYAANDKAIRYRVGIDVGLRSIGFCAVEVDDEDHPIRILNSVVHVHDAGTGGPGETESLRKRSGVAARARRRGRAEKQRLKKLDVLLEELGWGVSSNELLDSHAPWHIRKRLVSEYIEDETERRQCLSVAMAHIARHRGWRNSFSKVDTLLLEQAPSDRMQGLKERVEDRTGLQFSEEVTQGELVATLLEHDGDVTIRGFVRKGGKATKVHGVLEGKYMQSDLVAELRQICRTQRVSETTFEKLVLSIFHSKEPAPSAARQRERVGLDELQLALDPAAKQPRAERAHPAFQKFKVVATLANMRIREQSAGERSLTSEELNRVARYLLNHTESESPTWDDVARKLEVPRHRLRGSSRASLETGGGLTYPPVDDTTVRVMSAEVDWLADWWDCANDESRGHMIDAISNGCGSEPDDVEDEEVNELISSATAEDMLKLELLAKKLPSGRVAYSLKTLREVTAAILETGDDLSQAITRLYGVDPGWVPTPAPIEAPVGNPSVDRVLKQVARWLKFASKRWGVPQTVNIEHTREGLKSASLLEEERERWERFEARREIRQKEMYKRLGISGPFRRSDQVRYEILDLQDCACLYCGNEINFQTFEVDHIIPRVDASSDSRRTNLAAVCHSCNSAKGGLAFGQWVKRGDCPSGVSLENAIKRVRSWSKDRLGLTEKAMGKRKSEVISRLKTEMPYEEFDGRSMESVAWMAIELKKRIEGYFNSDRPEGCAAVQVNAYSGRLTACARRAAHVDKRVRLIRLKGDDGHHKNRFDRRNHAMDALVIALMTPAIARTIAVREDRREAQQLTRAFESWKNFLGSEERMQDRWESWIGDVEYACDRLNELIDADKIPVTENLRLRNSGKLHADQPESLKKARRGSKRPRPQRYVLGDALPADVINRVTDPGLWTALVRAPGFDSQLGLPADLNRGLKLRGKRISADFPIDYFPTDSPALAVQGGYVGLEFHHARLYRIIGPKEKVKYALLRVCAIDLCGIDCDDLFEVELKPSSISMRTADAKLKEAMGNGSAKQIGWLVLGDEIQIDPTKFPKQSIGKFLKECGPVSSWRVSALDTPSKITLKPRLLSNEPLLKTSRVGGHESDLVVAECVEKIMKKTGWVVEINALCQSGLIRVIRRNALGEVRTSPKSGLPISLNLR

SEQ ID NO: 283 - protein, 1120 aa, Actinomyces sp.
MNAMKQYNAGIDVGINSVGFAAIEVDSKGLPLNILNNMVVLHDSGVDPGTAKTGATRLANSGTARRTRKLIARRRKRLQKLDRYIEVQGWPLVDFSSLPDPYTPWKIRAKLTQDRLEGEEQGRGLSIALRHMARHRGWRNPYEGVESLHSPKEASKQFKDLKDRVTKVSGVIFDEDATPAEVVCDIGLSPKQRLRSAPSAKYKEGATLADEPVGGKSKEGLLGGKLMQSDNANELRKIGIVQGLSNEKVNEIIDQVFASESPKGQAGKRAKKDELPGQEQYVRALRAHLAFQRFRIVAAVANLRILEAEPKHERLLSQSEKDKVIEFLMSADGDDGVTWSDVAEELGIERECLSGTAKRGADGERPSSFPPTNSTNISIVRSKVKPLIEWWRKASDDEQATLVTALSNADELTDDQPSAETVRQFLSSPDEQSQEKIDKISLPKGRAAYSVNSLERLTRRMLKDSVDLFEARKREFGVDNNWTPTPDSIGEPVGNPAVDRVLKIVNRWLLAVTRKWGPPKVVNIEHVRVGFTSAAQTRKYEEENKTNRERNLAILEELRDKFGTSGKIRREDITRFAALRRQNCQCAYCGEAITFFDCEMDHIVPRKGPGSTNTRNNLVAICERCNKSKSNMPFSLWAQNCDIPGVSVEAVIDRVRTWIKDPELNPKQYNNFKKDVIERLRKTVDDDAIDNRSIESVAWMATELADRIGSHFRTAGANTKVRVYRGWLTSEARKASGFEGKINLIGGRGKTRLDRRHHAMDAATIALMRQSVAQTLVERASIRESDRLRRVVSSSWKDYRGADRDKQFSYGSWLNSMNALAELFNRAIDADGIPVTQNLRLRLGNGEAHDATIRSLEKKRVGASWTIGEIDRASTPQLWLALTRQEDFDQNDGLPANASRELRVKNHWFHAEENVTLFPTKSAAIAVRGGYAEIGNTIHHARLYKLPGKKLTYGMIRVFAIDLLCAWHTDLFSSPLLPESISLRTAETKVRRAVEDGAAMYIGWLVDGDEIVLDPETKAFKSNKIGEYLCEFPGTKRWKVDGFPDKEKLRLRPLQLAGEGLPEDVSAGTEEILGPKGNGWRVAINALFKSSQLVVVRRTALGMVRKLSRRHLPLTTRLRG

SEQ ID NO: 284 - protein, 1095 aa, Actinomyces sp.
MPAHHLRVGIDVGTHSVGLATLRVDDQGTPIELLSALSHIHDSGIGKEGQKDHDTRKKLSGVARRTRHLLRNRRERLQQLDKVLVDLGFPIPKPEEYPDLSERTDPYRVWRVRARLVEETLPEELRGPAISMAVRHIARHRGWRNPYSKVESLLSPAEESSFMKALRKRIMTKTGEVLDDDITPGQAMAQVALTHKIYMRGPEGILGKLHQSDNANEIRKICARQGISSDVCKQLLRAVFKAESPRGSAVSRVAPDPLPGQGSFRRAPKCDPEFQRFRIISIVANLRISETKGENRPLTVDERRQVVAFLMEDSQADLTWVDVAEKLRVSRQALRGTAMLTADGERSAAQPPIDVTDQIMRKTKISALKTWWDKADAERRGAMVRYLYEGLEDSECAEVIAKLPEKDHAKLDSLHLPAGRAAYSRESLTALSDHMLETTNDLHEARKRLFGVDDSWAPPAEPVGAPVGNPSVDRTLKIVARYLSAVESIWGTPEVIHVEHVRDGFTSERTAEERDKANRSRHNDNQKAIEKIQHDYGKEGYISRGDIVRFHALKLQGSACLYCGTTIGYHTCQLDHIVPQAGPGSNNRRGNLVAVCERCNHSKSNTPFAVWAQKCGIPHVGVKEAISRVNGWVEHNHSTSSGDLTRLKKEVIARLRRTQKDPEIDERSMESVAWMANELHHRIAAAYPETTVMVYRGSITAAARKAASIESRINLIGEKGRKDRLDRRHHAVDASVVALMEPSVAKTLAERSSLRGEQRLTGQEQTWKQYTGLTVGARERFEAWRGHMHRLTELFNESLAADEVYVTQNIRLRLSDGSAHTVKASKLVSHRLGDGLTVQQIDRACTPALWCALTREIDFDEKNGLPAREDRVIRVHGQEISSADCIQVFSKRKKTKSDRDEAPFGAIAVRGGFVEIGSSIHHARIYRIEGEKPAYAMLRVFTHDLLSQRHGDLFSAVIPPQSISMRCAATELRQAISEGRATYLGWIVSGDELHIPVETFTTHKIGSFLKDYPNTTRWRICGYDSETMLILKPRILSAEGLNNSSDIAEYVIKNKGWRVAINKLAKVHPTVVRRDALGRPRHSSRSNLPVTWSIE

SEQ ID NO: 285 - protein, 1144 aa, Actinomyces sp.
MSMIDSSENVPGIRYRVGIDVGLKSIGFCAVEVDRNDQPVRMLNSMVFIHDAGVDPNENKAAKSRKLTAGVARRTRRLYRTRHQRLVNLDRVLSKEFGWPLPDLTSFKDPREPWHVRAGLLEGYIADDEKRKEALSIALRHIARHRGWRNPYAKVETLLQPSEPSDFLKGLNDRISEELGRAFPADATPGQLVDTYLAHPDYVGRAGTPKLRGPQGILAGKLHQSDNAQEIRGICDVQRIEPAERDRLIRVVFEAKSPKGSAKERGLVGYDELPGQGRHVRAEKAHPAFQLFRMVSVLANLRIREGREERPLTPDELEDLVDFINQVSLKQEVTWQDLADKLRIERADLRGTAKASFDGSPVLRNPPTDVTTEKIMACKVKWLKEWWKEADDEQRGYMVDAFSNSGGSEDGTDVNDEVAELLEQATEDDQLEFEKISLPQGRAAYSLDSLRRLTDRMLRDGVDLHTARRLEFNVGDDWKPAVEPIGAPTGNPAVDRVLKQVSRWLHAATERWGEPTVINIEHARDGLGSERVARELMRENEKRRKANASAVAEMAAKLKLSGKVHRSDQIRYFALQRQNCQCLYCGAPITYTTAEMDHIVPRADGSSTNDRSNLAAVCRTCNHMKGKIPFAVWASSDKANQGVSLTGALERVNMWQRDSGMSPRQLKQLQREVCARLKSKKPDQEFDGRSMESVAWMAVELRTRIEGFYRSRDEESVPSVGVYRGQLTAEARRASGFESRVNLIGGRGKTRFDRRHHAMDALVIALMNPSVSRTLALRLNMRDAQRLTGVEETWKHFYGKPGEASKRFESWRESMLRGVELFNIALSDNAIPFVENIRLRVGSSVIHDATVHSFCPPKTPDGKQIITKGYGEQHSLGSAMPVELIDRAETPALWTALTRCPDFDPKKGLPENPQRTISVNGTRVGPTELVNFFEFSKSGPKACLKVRGGYVDLSGAIHHARIYRIAGKKTAYAMIRVFQVDLLRLKDHDVFTTPLKPSTISMRTAEPKIREALANGTATQIGWLVEGDELVIDTSKYSGGFIGEVLARYPEATSWRVAGFMTPAKLRIKPILLSKEGFVDETQAALLGVEVTSEAIQKTVDRPGWLPAVNVLFGAGGVRVIRRNCLGEERYHSSASLPVSMTLE

SEQ ID NO: 286 - protein, 1103 aa, Actinomyces sp.
MTKINDDLRYRVGIDVGLKSIGFCAVEVDENDQPLRLLNSMVFVHDAGVDPNENKAAKSRKLTAGVARRTQRGTAQNRRRLAELDRALSEELNWPLPNLEDFEDSYEPWHTRAELVEHYIKDDAERAEALAIAIRHIARHRGWRNPYLSVDSLLTPQEPSKFLRGLNERVTQALGREFPADATPGQLICAYIDSPKYAETQGIRGDSGILSGKLHQFDNVGEIRKICEVQRLDHDVFKLLVRKVFFAKSPRGSAAGLVGHDQIPGQGKYIRAEKAHPDFQLFRIVAVLTNLRIREGKAERCLTPDELRGLVDYILEVQLKQQVTWADLADNLGIERTDLRGTARASFDGSPALRFPPTDVTAEKIMASKVKWLKDWWDKADSERRGFMVDALSNSGGSTGDNDIDDEVAALLEAATEDEQAELEKIQLPQGRAAYSLDSLRRLTKRMLEEGVDLHTARKEEFNVDDDWRPEPEPIEAPVGNPAVDRVLKQVARWLNMATDRWGVPDVINIEHTRDGLGSEKVARELLRESQKRQDLNQKDMDKMIRELGISGKARRSSLIKYQAIQRQNSMCLYCGTEIGFETAEMDHIVPRALSGSTNDRSNLAAVCRACNHQKGAVPFAVWATSGEAHAGVSLEDAIKRVRLWQKGPGMSPKQHKAFQNEVISRLKSRKPDEEFDGRSMESVAWMAVELRTRIDGYYRKVNSDSVPKVGIYRGQLTAEARKASGFENRVNLIGGKGKTRFDRRHHAMDALVIAMMNQSVSQTLALRVNMRESQRITGQEETWKNFYGKPGQASERFEKWREGMLRAVELFNIELAKNAIPFHENVRLRVGSSKVHDDTVRKFIHAKLGEALSVAMIDCAETPALWTALTRLPDFDPKDGLPEDLSREIYIHSRKITADEQLNFFNSPSACLKVRGGYVEIGSSIHHARVYRIDGKKTTYSMVRVFATDLVKMTHEDVFTTPLKPSTISMRTADPKIRKALADGTATQIGWLVEGDELQLETDKYSGGLIGEVLAEYPQLTSWRVAGFYGVTQLRLRPYMLAAEGIPSDASESLRKVIEGKGWLPAINALLSSGCVKVVRRNCLGEPRFNAKSSLPVSQLLR

SEQ ID NO: 287 - protein, 1114 aa, Actinomyces turicensis
MQFHFYMVYVTMKGMNDKDASQQLRYRVGIDVGTHSIGFCAVEVDESGMPIQLLNSMVHKHDSGIDPGGNDTATTRLAEAGVARRTRRLIRRRKKRLQELDAFIEECGWPLVDLATITDARSPWRIRAHLATEHIDDEAEQGKLLSIALRHMARHRGWRSPYARISSLHIQADPSEQLKALAQRVSEKTGISLTADQTPAQLISVYLDVFETGKLRGPEGILGGKLMQSDNANELRRIATVQGLDNDLLKKIIGFVFAAESPKGSAAKRVGKDVLPGAHGLRAEKAHPAFQQFRIVSIVQNLRIKEGTGLRALTSEETEIVVDFLNQAGLTEAPTWEEVADNLEIPRSHLKGTATEGFDGIAPSTRPPFDVTSQKILNGKLKKLSAWWKDADYDHRCAMVNALSNVGSDDEGSLADDDVREFLSDFTDEELEALDKVELPGGRAAYSVDSLEKLTNTMLSEGCDLHSARKIAFGVDDSWTPPAEPIGQPVGNPAVDRVLKQVARWISAATNQWGTPESVNIEHVRDALGSEKASREYQRSLQTRRIRNEKLFAEMRERLDIGGKPRRSELTRYLALQRQNCQCLYCGMPITYTDAEMDHIVPRKGAASTNTRENFAAVCRACNHQKSNLPFAVWAEKTERPGVSVKEAYKRVSDMRIEPGMNGRQMNEFRKAIRLRLTTKHADAEIDGRSLESVAWMANELRHRIEGFYRSAENDVTVRVFRGAVTAEGRRASGFESRVNLIGGKGKTRLDRRHHAMDALTIALMEPGIAQTIALRMNMRESQRVLGEQETWKSFTGGSDTARKRWEHWCEEMLRASELFNVFLAEDRIPICQNKRLRLGSSAVHKAIVQPFEASDKRIVSDAMPVELIDRASTPALWTALTRDPDFDPKEGLPANPSRTIRLHDKRLGPNETVEFFPTAAACLAIRGGYCEIGAGIHHARIFRISGKKTTYAMLRVYQCDLVRFQKENLLTVELPANTISVRTAVPKLREALAHGTAEQIGWLVVGDELKIDLSGFTTGQIETFNETYPQATRWEVTGFPTKTQLRLKPLLIASEGLADDVPDDIVKIVKGPGWWPAIDKLLKIGNVVLYRRDTHGKPRVVSHRSLPLSSKLQ

SEQ ID NO: 288 - protein, 1113 aa, Alcanivorax sp.
MRYRVGLDLGTASVGAAVFSMDEQGNPMELIWHYERLFSEPLVPDMGQLKPKKAARRLARQQRRQIDRRASRLRRIAIVSRRLGIAPGRNDSGVHGNDVPTLRAMAVNERIELGQLRAVLLRMGKKRGYGGTFKAVRKVGEAGEVASGASRLEEEMVALASVQNKDSVTVGEYLAARVEHGLPSKLKVAANNEYYAPEYALFRQYLGLPAIKGRPDCLPNMYALRHQIEHEFERIWATQSQFHDVMKDHGVKEEIRNAIFFQRPLKSPADKVGRCSLQTNLPRAPRAQIAAQNFRIEKQMADLRWGMGRRAEMLNDHQKAVIRELLNQQKELSFRKIYKELERAGCPGPEGKGLNMDRAALGGRDDLSGNTTLAAWRKLGLEDRWQELDEVTQIQVINFLADLGSPEQLDTDDWSCRFMGKNGRPRNFSDEFVAFMNELRMTDGFDRLSKMGFEGGRSSYSIKALKALTEWMIAPHWRETPETHRVDEEAAIRECYPESLATPAQGGRQSKLEPPPLTGNEVVDVALRQVRHTINMMIDDLGSVPAQIVVEMAREMKGGVTRRNDIEKQNKRFASERKKAAQSIEENGKTPTPARILRYQLWIEQGHQCPYCESNISLEQALSGAYTNFEHILPRTLTQIGRKRSELVLAHRECNDEKGNRTPYQAFGHDDRRWRIVEQRANALPKKSSRKTRLLLLKDFEGEALTDESIDEFADRQLHESSWLAKVTTQWLSSLGSDVYVSRGSLTAELRRRWGLDTVIPQVRFESGMPVVDEEGAEITPEEFEKFRLQWEGHRVTREMRTDRRPDKRIDHRHHLVDAIVTALTSRSLYQQYAKAWKVADEKQRHGRVDVKVELPMPILTIRDIALEAVRSVRISHKPDRYPDGRFFEATAYGIAQRLDERSGEKVDWLVSRKSLTDLAPEKKSIDVDKVRANISRIVGEAIRLHISNIFEKRVSKGMTPQQALREPIEFQGNILRKVRCFYSKADDCVRIEHSSRRGHHYKMLLNDGFAYMEVPCKEGILYGVPNLVRPSEAVGIKRAPESGDFIRFYKGDTVKNIKTGRVYTIKQILGDGGGKLILTPVTETKPADLLSAKWGRLKVGGRNIHLLRLCAE

SEQ ID NO: 289 - protein, 1146 aa, Alicyclobacillus hesperidum
MAYRLGLDIGITSVGWAVVALEKDESGLKPVRIQDLGVRIFDKAEDSKTGASLALPRREARSARRRTRRRRHRLWRVKRLLEQHGILSMEQIEALYAQRTSSPDVYALRVAGLDRCLIAEEIARVLIHIAHRRGFQSNRKSEIKDSDAGKLLKAVQENENLMQSKGYRTVAEMLVSEATKTDAEGKLVHGKKHGYVSNVRNKAGEYRHTVSRQAIVDEVRKIFAAQRALGNDVMSEELEDSYLKILCSQRNFDDGPGGDSPYGHGSVSPDGVRQSIYERMVGSCTFETGEKRAPRSSYSFERFQLLTKVVNLRIYRQQEDGGRYPCELTQTERARVIDCAYEQTKITYGKLRKLLDMKDTESFAGLTYGLNRSRNKTEDTVFVEMKFYHEVRKALQRAGVFIQDLSIETLDQIGWILSVWKSDDNRRKKLSTLGLSDNVIEELLPLNGSKFGHLSLKAIRKILPFLEDGYSYDVACELAGYQFQGKTEYVKQRLLPPLGEGEVTNPVVRRALSQAIKVVNAVIRKHGSPESIHIELARELSKNLDERRKIEKAQKENQKNNEQIKDEIREILGSAHVTGRDIVKYKLFKQQQEFCMYSGEKLDVTRLFEPGYAEVDHIIPYGISFDDSYDNKVLVKTEQNRQKGNRTPLEYLRDKPEQKAKFIALVESIPLSQKKKNHLLMDKRAIDLEQEGFRERNLSDTRYITRALMNHIQAWLLFDETASTRSKRVVCVNGAVTAYMRARWGLTKDRDAGDKHHAADAVVVACIGDSLIQRVTKYDKFKRNALADRNRYVQQVSKSEGITQYVDKETGEVFTWESFDERKFLPNEPLEPWPFFRDELLARLSDDPSKNIRAIGLLTYSETEQIDPIFVSRMPTRKVTGAAHKETIRSPRIVKVDDNKGTEIQVVVSKVALTELKLTKDGEIKDYFRPEDDPRLYNTLRERLVQFGGDAKAAFKEPVYKISKDGSVRTPVRKVKIQEKLTLGVPVHGGRGIAENGGMVRIDVFAKGGKYYFVPIYVADVLKRELPNRLATAHKPYSEWRVVDDSYQFKFSLYPNDAVMIKPSREVDITYKDRKEPVGCRIMYFVSANIASASISLRTHDNSGELEGLGIQGLEVFEKYVVGPLGDTHPVYKERRMPFRVERKMN

SEQ ID NO: 290 - protein, 1552 aa, Anaerophaga sp.
MFSQRNNPYCELLQNVKQLYKEKFGKTNQVDNSIIYGFMKRILGLDLGTNSIGWALVENDENDRKGKIIGMGSRIIPMDMSELDNFNKGASISKTAERTRLRMTRRLRERHLLRRARLHRILNIMGFLPEHYRNSIDFIDKKGCFFEGQEPKIAYKPDKNSEQFCFLFTSSFHEMLEDFRKFQPELIQNRKKVPYDWTIYYLRKKALTQKISKEELAWIILNFNTKRGYYHLRGEDEDNQDNKKIKEFRALKVVNVTEREGANSSGKKWYDMELENGWVYSRQSNLPPNLEGKTIELIVSYTLDNNGNIKKDKNGKEKYSLSMPGEEDWNLVKIKTENDLKTSKKSVGEYIYDHLLKNPDQKIRGKLISTIERKFYKEELSRILKTQMNFYEELKNRELYQKCVEELYPNNKSHQQTLLQKDFIHLIVEDIIFYQRPLKSKRAFVNNCPLEYRVYVDKKSGELIKSGVKCIPKSHPLFQEFRLWQYVRNLRIYERERMVNGRLMVNVDVTNELLPDEEHIVRLFDLLNDRKSFKQDDVLRFVGIKSPKDRKRYSWNYPEDKELPGNETRHLILAWLKKVDGVPEDWLDPEKLKALWHLLYSVTDREEIIKGLHSFAKKYELPDTFVEHFKKIPRLEREYGSFSEKAIKKLLPLMRMGKYWKAEEIPADLLEKAQKIIDAEADDRISDEVREKLLHLKDISQLKGLPLWQASYLVYGRHSETGEVVKWRTSEDLEKYILQFKQHSLRNPVVEQVILEALRVVKDIWEHYGEGKEGFFNEIHVEIGRELKNPADKRKKITSQIQENENTNLRIKALLEELFNDPSVKNVRPYSPAQQEILRIYEDGVLNGQKEIPDDILKISKMARPSKSQLVKYKLWLEQKYRSPYTGEIIPLSQLFTSAYEIEHIIPQARYFDDSFSNKVICEAEVNREKGHQLAFEFITKRGGDEIELNFGKKVTILNVEEYQKFVKDHYGRSLRSLSKMRKLLMEDIPDDFIDRQLNDSRYISKVVRNLLSNIVRAEDENSLVSKHLITCTGGVTTRLKHEWGLNDVWNELITPRFVRLNKMGKEKFGEWINKKGKQVFQIQMPLELQKGFNKKRIDHRHHALDALVVACASRSHVNYLNNDSARANASETRYDLRNKLCYKDKTDSNGNYRWKFYKPWESFTEEAKNRLAGTVVSFKSNRRIMTRSSNRYFKWVDTSEGKKKKLVRQIKGDNQAIRKPLHKDTVLGKVSLRKEKKVSLSKAIDLWESIVDKPLKKRIQSLREQGYDKKLLLKYFKDRNNQFNGQDISRVNIYFFDNNLAARRVTLDASFNSEKRIDGITDSGIKKILYAHLQNEKYHGKKDEKGNEISPYELAFSPEGLEEMNANIKKLNGGKPHCPIYKVRLAETIGEKFKLGEKGNKNKKYVEAAKGTNLFFAVYVDEKGVRSFETIPFSVALERRKQKLAVVPEENENKEKLLFYLSPNDLVYVPDEDEKLIDYRQLSINPTRIYKMVSSSGTQCFFIPHFVASPIVQTMELGPNNKSERAWDGQMIKNVCYKLSVDRLGNVKIEK

SEQ ID NO: 291 - protein, 1515 aa, Anaerophaga thermohalophila
MKRILGLDLGTNSIGWALVESDEEQKSGKIQGIGSRIIPMDQNELDNFNKGNTVSQTAERTRLRMVRRLRERHLLRRERLHRVLKEIGFLPEHYLEQIDFTEKPGGFLPGKEPKIAYKPDNFKDKYDFLFQDSYHEMLSDFQDKNPEFIQKRKKVPQDWTIYYLRKKALTAKITKEELAWIILNFNQKRGYYQLRGEDEDVAKNTKKEEFHALKVVKVKEREDSEGASGKWYDIELENGWVYPRQSNIRPDWEGKILELIVTYNLDKDGNIKTDKEGNEKRSFRMPNKDDWTLRKKRTENEIEKSGKTVGEYIYDNLLDAPDLKIRGKLVSTIERKYYRSELEQILTAQKKYHPELSNSELFNKCISNLYPNNDIHRKALLSKDFVHLIINDIIFYQRPLKSKRSTVSNCPLEYRVYVDKVTGEKKKVPLKCIPKSHPLYQEFRLWQYVKNLRLFEKERFENGRLLTNVDVTEQFLPDEDKYVELFEFLNGRKTFKQDDILKFAGIKSAKDRVKYYWNYPQEKEYPGNETRYLIESRLKKIENVPDEWLNYEKIEELWHLLYSVTDKVEIEKGLQSFAAKYQLPDLFVEVFKGFPRMEREYGAFSKKAIKKLLPLMRMGKYWKLENINPDLIEKVQKIIDGEADDNINDGIRERFSEINEMSDLRGMPLWKASYLVYGRHSEAAEVIRWRTSADLDQYIKDFKQHALRNPIVEQVVLEALRVVKDVWNYFGEGREKFFDEIHVEIGRDLKNPADKRQKIANQIQENENTNLRIKALLVELFNDPEVQNVRPYSPVQQQLLKIYEDGVLNAERDIPDDIQKISRMANPTRNQLIRYKLWLEQKYRSPYTGEIIPLNKLFTSEYEVEHIIPRARYFDDSFSNKIISEAEVNRKKDRMLAFEFIKKLGGSTIDLNYGKKVSVLTVEEYQQFVKDHYGINPHSRLKMQKLLMDEIPESFIERQLNDSRYISKMVRNLLSNIVREENENSPVAKQLITCSGSITNTLKQEWGLNDVWNTIITPRFERLNKMGEQKYGEWVNKEGKPVFQIQMPLELQKGFNKKRIDHRHHALDALIVASATRSHVNYLSNEAAKTNAKDTRFDLRNRLCYKEKRGQNRNFTWRFYKPWNTFTEDAKNALNDIVVSFKSNHRVINKSTNRYFKWENLPGGMKKKRLVRQEKGDNWAIRQSLHKDTVLGKVSLRKVKPVSLSVALDSWNNIVDKALKKKIRSLKDQGYDKKLMLKYFKDRRNEYNGENISRVNVYYFDEEMAARRVDLDTSFNSEKRIEGITDSGIKKIIYAHLKNEKYHGQKDDKGKDISPYELAFSPEGIAEMNANIKQLNGGKPHCPIYKVRLAEPVGEKFQLGETGNKTEKLVEVAKGTNLFFGVYANDEGVRSFATVPFYLAVEREKQGLPAVPQENENGDQLLFWLSPNDLVYVPSEEDAHFANPKQIELDNSRIYKMVSSTGTQCFFIPHFVATPIVQTIELGPNNKSERAWDGQMIKKVCYKLSVDRLGNVEIE

SEQ ID NO: 292 - protein, 333 aa, Bacillus cereus
MMNPNNFTKEDFWRTIILYGLNQATYKIALGQSLIRFSEQQRNVVSMNELAEDFFDMYLERLKNGKPQLATPNRQTAMERIINSYNIGRLTRSQAIEKVEREAFNDVIDRFHTVDSLQVPMKFYEKTDKGIVIFDNVFEIFSDNNNFELRNELDARWDLLESAFEIKRTDSQLVNDIRKLYLANGYERTDITKNRSVLNGYQSNVCFYCGELMSDDDVHVDHVIPRQLINHDDIWNLVLSHGFCNQQKSDNLPDVNYIEKLIERNEYFIKSNHPISNKLKERLGNTPRRRRTTIDRIYEHAKLVLAPWKGIYGYNPATDPFYKTFIRNIVLSK

SEQ ID NO: 293 - protein, 1068 aa, Bacillus cereus
MRYVLGLDIGIASCGWAVINQEKERIEDLGVRIFDKAENPKDGKSLAAPRRDARSTRRTLRRKKHRMQRIKILLVKQGLLFKTELNHLYESATEFDVWNLRLDALERKLHPKEFARVLIHLAKRRGFKSNRKETTLSENGQILESISENQQIMEQQNYRTVGEMILKDKKFENHKRNKDGTYIGTVTRQQLQDEIQMIFHTQRLYKNDYATEEFESSYLEIWASQRPYASKDQIEKMIGYCTLEPKEKRTPKASWSFQYFVALQTINNLRLISKDKIEELSFEEKKQIMNLALEKPIVKYIDIRKLLSIPNDFQFNSLSYSADTVDTTLENKRCIELKEYHSINKVYKQVYGKNTPNLLPIDYDTIAYGLTIFKDDKDILEYLQNKYVNAKGKPIKNLAKKTYDDTFIQALLNLNFTKMGHLSFKALKNIIPFLEEGLSYDKACEKAGYNFKGTSYTERTKYLPVIPQNTNPVVHRALSQTRKVINAIIKKYGSPNAIHIETARELSKTFQERKEIDSRYQDNSKKNEHAIHKLKELGNINPSGINIVKFKLWSEQDGRCMYSGKYIEPHRLFEEGYTEVDHILPYSRSLDDSYNNKILTLGTENQRKGNKTPYEYMGNTSIWDEFETRVQSNKKINFKKQQKLLLQNFSYAREQEFIERNLNDTRYATIYLTSLIQQHLIFSESSSKKKVRTVSGIITSHLRSRWGFNKDRKEGHIHHALDAVIVAVTSNHMIQRVTKYYKLKELNKNLQAKQLPFPEPWEGFRLELEARISPNTQQYLKGIHFKNYADVNLSDIKPIFVSRMPKRSITGELHQETIRKFLGYNEKGKVLTAIKTKLEDIPFDANGDFPMYGKETDLYTYNAIKERYLSHEKDKRKSFQEPLYKPTKSGEIGPLIKSIKIMDTRTIVNPVNQGKGVVYNSKIARTDVFKKEDKYYLIPIYTIDLLKNILPHKAITAGKGYEDWTTIDSSFTFLFSLFPNDLIQIVPSKNKTIKARTTVSKKEILLPSLTGYFKGVHSGTAGITVETHDGSVIANVGSKQLLLFEKYQVDVLGHYTKIKEEKRMGMAI

SEQ ID NO: 294 - protein, 1078 aa, Bacillus cereus
MRYVLGLDIGIASCGWAVINQEKERIEDLGVRIFDKAENPKDGKSLAAPRRDARSTRRTLRRKKHRMQRIKVLLVKHGLLSKTELDHLYESATEVDVWNLRLDALERKLYPKEFARILIHLAKRRGFKSNRKETTLSENGQILESISENQQIMEKQNYRTVGEMILKDKKFENHKRNKNGTYVGTVTRQQLQDEIQMIFHAQRLYKNDYATEEFESSYLEIWASQRPYASKDQIEKMIGYCTLEPKEKRAPKASWSFQYFVALQTINNLRLISKDRIEELSFEEKKQIMNLALEKSIVKYIDIRKLLSVPNEFQFNSLSYSADTVDTAVESRKCIELKEYHSINKVYKQIYGENALNLLPKYYDTIAYGLTIFKDDKDILEYLQNKYVNAKGKPISNFANKTYDDTFIQALLNLNFTKMGHLSFKALKNIIPFLEEGLSYDKACEKAGYNFKGTSYTEQTKYLPVIPQNTNPVVHRALSQTRKVINAIIKKYGSPNAIHIETARELSKTFQERKEIDSMYQDNSKKNEHAIHKLKELGNINPSGINIVKFKLWNEQDGRCMYSGKYIEPHRLFEEGYTEVDHILPYSRSLDDSYNNKTLTLGTENQRKGNKIPYEYMGNTSIWNDFETRVQSNKKINKKKQQKLLLQHFSYAREQEFIERNLNDTRYATIYLSSLIQQHLIFSESSRKKKVHTVSGIITSHLRSRWGFNKDRKEGHIHHALDAVIVAVTSDHMIQRVTKYYKLKELNRNLQAKRMPFPEPWEGFRLELEARISPNTQQYLKGLRFKNYADVNLSEIKSIFVSRMPKHSITGELHQETIRKFIGYNEKGKVLTAIKTKLEDIPFDANGDFPMYGKESDLYTYNAIKERYLSHKKDKRKSFQEPLYKPTKSGGIGPLIKSIKIMDTRTIVNPVNQGKGVVYNSKIARTDVFKKEEKYYLIPIYTIDLMKNILPQKAITAGKGYEDWTTIDPSFTFLFSLFPNDLIQIVPSKNKTIKARTTVSKKEVLLPSLTGYFKGVHSGTAGITVETHDGSVIANVGSKQLLLIEKYQVDVLGNYTKIKEEKRIGLTTYNDNKKIAAC

SEQ ID NO: 295 - protein, 1088 aa, Bacillus smithii
MNYKMGLDIGIASVGWAVINLDLKRIEDLGVRIFDKAEHPQNGESLALPRRIARSARRRLRRRKHRLERIRRLLVSENVLTKEEMNLLFKQKKQIDVWQLRVDALERKLNNDELARVLLHLAKRRGFKSNRKSERNSKESSEFLKNIEENQSILAQYRSVGEMIVKDSKFAYHKRNKLDSYSNMIARDDLEREIKLIFEKQREFNNPVCTERLEEKYLNIWSSQRPFASKEDIEKKVGFCTFEPKEKRAPKATYTFQSFIVWEHINKLRLVSPDETRALTEIERNLLYKQAFSKNKMTYYDIRKLLNLSDDIHFKGLLYDPKSSLKQIENIRFLELDSYHKIRKCIENVYGKDGIRMFNETDIDTFGYALTIFKDDEDIVAYLQNEYITKNGKRVSNLANKVYDKSLIDELLNLSFSKFAHLSMKAIRNILPYMEQGEIYSKACELAGYNFTGPKKKEKALLLPVIPNIANPVVMRALTQSRKVVNAIIKKYGSPVSIHIELARDLSHSFDERKKIQKDQTENRKKNETAIKQLIEYELTKNPTGLDIVKFKLWSEQQGRCMYSLKPIELERLLEPGYVEVDHILPYSRSLDDSYANKVLVLTKENREKGNHTPVEYLGLGSERWKKFEKFVLANKQFSKKKKQNLLRLRYEETEEKEFKERNLNDTRYISKFFANFIKEHLKFADGDGGQKVYTINGKITAHLRSRWDFNKNREESDLHHAVDAVIVACATQGMIKKITEFYKAREQNKESAKKKEPIFPQPWPHFADELKARLSKFPQESIEAFALGNYDRKKLESLRPVFVSRMPKRSVTGAAHQETLRRCVGIDEQSGKIQTAVKTKLSDIKLDKDGHFPMYQKESDPRTYEAIRQRLLEHNNDPKKAFQEPLYKPKKNGEPGPVIRTVKIIDTKNKVVHLDGSKTVAYNSNIVRTDVFEKDGKYYCVPVYTMDIMKGTLPNKAIEANKPYSEWKEMTEEYTFQFSLFPNDLVRIVLPREKTIKTSTNEEIIIKDIFAYYKTIDSATGGLELISHDRNFSLRGVGSKTLKRFEKYQVDVLGNIHKVKGEKRVGLAAPTNQKKGKTVDSLQSVSD

SEQ ID NO: 296 - protein, 1069 aa, Bacillus thuringiensis
MNYDIGLRIGITSCGWSIINKDLERIEDLGVRVFEKAENPDGTASAAPRREARKSRRKHRRKKHRIERIKRLIVQHDLLSKKELDSLYLSPFNIDVWNLRVEALERKLDNREFARVLIHLVQRRGFQTIRKSVEIQEEGKLLENVSENERIMKVNGYKTVGEMFSKHEKFTHHKRNKDGSYTSVVTRSLLLKEIKTIFNSQRILGNVFSTQKLESDYLYIWGSQRPTLTYEQLMSMVGNCIYEKKEKRAPKTSWAFQYFSLLQKINKLKVSDDNTLRKLSKEERDIVIELAFKKKNVSFVDIRKALKLNDNTKFNHLTYSHVVETKKVEKATFIELKGYHLIKKQLKDRNVELTQELQPKDYDAIAAASTFFKNDIEFRDYLRNQYLDSNGKRKSNIANKVFEDKVIAAVFELNFSKVCHLSFKSLYKLIPHLEKGLDYKEAILCAGYNFRDENKRDKKLFLPVIQQETNPVVHRALTQARKVINAIIREYGSPNTIRFVVANDLAKTYKQRKELESTLKKNRAENEKIKTKLLSMGIINPTGMDIVKYKLWYEQSGICLYTGRQMELSSLFKPGYSIVNHIIPYNRSFDDTYHNRVLTLTETKYEKGNKIPFEYFGAEETCWNEYEKRVSTSKKIHDKKREKLLIRNFDIEYENEMISNNVFDTHYIGSYFEKYIDEHLQFKKSTKKQKVFSIHGNMVAHLHSRWGFNKNSREIYLNHAVDAAIVAVLTDQLIRNIADYYRRDNILEQKGSLKFPEPWKSFSIELEARISPQVRDLIKKLNLDSYLDVDILHIKPVFISKKPRRKVNGEAHKSTIRSLIGINEIGKTVTCIKTRLEDIPFDENGDFPMYGKDTDKYTYTAIKERYLEFNKDKEKAFSTPLYKLKRNGEPGNQIKSVKIIDTRNIVNKVNQGKGIAYNSNIIRVDVFSRDQKYYVVPIYLRDFIKGSLPNKIITAAKGFMQWPETDNSYTFLFSIFPNDLIKVVPKEGKFIKAKNENKENINLTEILGYFKGLDSSTGAFTLESHDGSLLARGIGTKNLLLIEKYQVDVLGRYNKVGNEERQDIKIQQN

SEQ ID NO: 297 - protein, 206 aa, Bacteroides cellulosilyticus
MKKILGLDLGCNSIGWALVNEAENTEEISSIIKLGVRVNPLTVDEMQNFEKGKSITTNADRTLKRSMRRNLQRYKLRRDTLIEVLKEHGFITDSTLLSEHGNKTTFETYRLRAKAAVEEISLEKFARVLLMINKKRGYKSSRKAKGSEDGVLIDGMDVARKLYEEGLTPGELCLQILEAGKKNLPDFYRSDLQNEFDRIWNFQKLV

SEQ ID NO: 298 - protein, 349 aa, Bacteroides coprosuis
MKKILGLDIGTNSVGWAVVNTNQEGEPSQIEKLGSRIIPMSQDILDKFGQGQTVSSTASRTDYRGIRRLRERSLLRRERLHRVLHILDFLPKHYADSIGWDPRNSKTYGKFLPGTEVKLAWVPTADGHQFLFYSTYLEMLEDLKQTQAQLFETSQTPVPLDWTIYYLRKKALTQPITKHELAWLLLHFNTKRGYYQRRGELEDTPTDKLVEYHALKVVDVEVDPEDQSKKPWYFVHLENGWIYKRQSSEPLDNWKGLVKEFIVTTHLDKEGKPKLDKEGEVRRSFSSPKEDDWTLVKKKTENDLEKSGLTVGAYIYQTLLNKPNQKIRGGLIKHIERNYYVEELEQILR

SEQ ID NO: 299 - protein, 1504 aa, Bacteroides coprosuis
MKKVLGLDIGTNSVGWAVVNQNDKGEFLSIEKIGSRIIPMSQDVMDKFGAGQTESSTAQRTQYRGVRRLRERSLLRRERLHRVLHILHFLPQHYDAAIGWNKKENKTYGKFLPGVEVNIPWVATDQGHQFIFMDSYAEMLKDLKQHQPHLFEKSSTPVPLDWTIYYLRKKALTQAISKEELAWILLNFNQKRGYYQLRGEEVEDNTKREEFYALKVVKVELDKDNTSAKTWYKVHLENGFIYPCPSDTPIDSWVGMVKDFIVTTTLEKDGSEKRTADGEIKRSFRAPKEDDWTLLKKKTESELEKSGKQVGAFIYDTLLSNPDQKIIGGLIKTIERKYYKKELEQILETQQKFIAELSDKKLFQACAEELYPLNDSHRENLLERDFKHLFVQDIIFYHRPLKTKKSLISNCTYEYRTFYKNGEKQISPIKCIAKSNPLFQEFRVWQFVQNLRILQRQRSEGDSIKYNVDVTAEFLKDENDIANLFTWLNERKVIKQDQLLKSYFKLKVNKETKELDYRWNYVDDKNKEYPCNATRTHILSFLEKCKEEKRIEDDRFVYSLWHLLYSVVEPIELRGALAKFAEREHLHPSFVDVFAQFPPLEKEYGSYSEKAIKRLLPLMRMGDYWHEDKIDVKTKQRIQRIIDGEADDDITHRSREKVENLRSITDFKGLPLWKAGYVVYNRHSESGELTKWKTPHELSNYIQNEFKQYSLRNPIVEQIVLETLRVVHDLWVKHGDFSEIHLELGRDIKNSSDKRKRMAERQQENENSRQRVLEMLIDLKKEAAFADLNPYSPSQQEKLRIVEDGVLRSNIEIPKDIEKITKSAKPTSRELTKYRLWLDQKYRSPYTGQPISLAQLFTSKYEIEHVIPQAKYFDDSFTNKVICESEVNKEKGSMLAHEFILKNGGSTVNVGGRQVQVLKNDAYVELINRLYGKNNPVKAKKLLAEDIDEVVGDFSERQLNDTRYISRVVQKLLSNIVREEDEQESTSKHVIGCSGQVTTALKKDWGLNDIWNKIIQPRFERLNEMTATEDYGVWQSPNHFQIRVPEEIQKGFTKKRIDHRHHAMDALVIACATRSHINYISNRSGQDRNAKFETTRTDLRSKLCYKENSSGNNYNYIFNKPWDTFTQDAHRALENIVVSHKQNLRVLTKTNNYTQFINKDGKKDLQKQVKGDHFAVRKPMHQETIYGRVSIRSIKEVALKKALENWKQIVDRTLKDKIRELIGAYGKYDAQTILKYFKDRDYKFNNLKINRVEVYEYDHNCAAVRKSIGDDLTIKQIERITDESIRKILMNHLSNYDDNLKEAFSPEGLMEMNKNIKELNGGKNHQPIYKVRLFEDLGSKFPLGVSHNNPDKYAIAAKGTNLFFGIYEDQEGKRMFDSIPLNIVIDRLKEKKSPVPETYNESKLKFHLSPNDLVYVPTDEEQKQPELVDVDHLSDEQKGRVYKAVSFTGNRAFFVNHRVSKVIHDYVEFGTKNKIENDDDKRSLKHICWKLKVNRLGEITDVKR

SEQ ID NO: 300 - protein, 1509 aa, Bacteroides eggerthii
MKTILGLDLGTNSVGWAVINSVIKEQAERIWIEMAGSRIIPMDAAVLGDFDKGNSISQTSERTRLRGARRLRERQLLRRERLHKVLNILGFLPNHYLEYIDFEKHPGKFLADAEPKLAWVKDEQGKYTFLFQAAFDEMLADFAIHQPSLVSGDKKIPYDWTIYYLRKKALTEMISKEELAWILLNFNQKRGYYQLRGEEEEDNAGKSVEFYALKVLTVEATDEKKGRDVWYNVHLENGWIYRRSSSVPLDWEGQVKEFIVTTDLNPDGTPKLDKYGEVKRSFRAPKEDDWMLIKKRTEADIANTHKTVGAYIYDTLLQKPQQKIIGKLVKTVERKLYRDELSLILQKQCAFHAELQDRALYARCVEALYPSNEVRRKNIANRDFVYLLMDDILFYQRPLKTKKSLIANCPYEENEYVDRETGEIKKTPLKCIAKSHPLFQEFRLWNFLSNIRIYQKEKEINGTLHLDVDVTAEFLKTEDDYVALFDWLNSRKEIEQKTFLKYPKFGLKKEISNYRWNYVEDKQYPCNETRHAILSSLEKANVCIDFLSNEKEVALWHILYSVSDKQEIEKALRTFAAKNGLDESFVEAFKKFPPFKSEYGAYSAKAIKKMLPLMRCGKYWDVSSIDDTTKERIKKIVTGEYDERISVKVRDKVMNLSDISCFRRLPLWLACYIVYNRHSEDKEAVKWESPADIDAYLASFKQHSLRNPIVEQVITETLRVVRDIWKQVGRIDEIHIELGREMKNPADKRKRMTAQILENENANLRIKALLAEFMNPEYEIENVRPYSPSQQEILRIYEDTVLHAEDQLPEEIDAILKKFNSSKVPTKSEFLRYKLWLEQKYRSPYTGELIPLGKLFTAAYEIEHVIPQSRYFDDSFSNKVICESAVNKLKDNQLGYEFIKNHHGQKVEVGFGKSVEIFSVDSYERFVKEQYAKSAVKMKKLLMDDIPEQFIERQLNDSRYISKVIKGLLSNIVREKNDSGEYEPEAVSKNIVVCTGSVTDRLKRDWGMNDVWNSIVYPRFERLNSLTDTQSFGHWENKSGKKVFQTELPLEYQKGFSKKRIDHRHHAMDAIVIACATRNHVNYLSNESASRNAKISRYDLQRLLCDKNRTDDNGNYKWVIKKPWDTFTQDAREVLSKIVVSLKQNLRIINKTTNVYRHLDATGNRVYEKQKTGDSWAIRKPMHKDTVFGAVNLRKVKVVRLSVALDTPAMIVDKRVKNKVFELLSYKYDKKRIEKYFKENAFLWKELDLAKVAVYYFTEATTEPLVAVRKPLDSTFNEKKIKESVTDTGIQKILLNHLCTKEGKPDLAFSAEGIEEMNRNLLQLNNGKSHQPIYKVRVYEPRGNKFSVGVLGNKGTKWVEAAKGTNLFFAIYITEDGKRTYETIPLNVVIEREKQGLVPVPDRNKKGDKLLFWLSPNDLVYLPTEEEREFGRINEPIDRGRIYKMVSCTGNEGHFIPANVANPIVPVIELGSNNKAQRAWTNEMIKDICIPIKVDRLGHIIEVKYRIDE

SEQ ID NO: 301 - protein, 1526 aa, Bacteroides faecis
MKKILGLDLGTNSIGWAVLNAADDNSLKYIEAAGSRIIPMDAAILGDFDRGNSISQTAERTRIRGMRHLRERYLLRRARLHRILNLLGFLPFHYAQDIDRYGNFSADMEPKIAWCKNLEGELEFIFIESFNEMLEDFRKNQPELVADNKKVPYDWVIYYLRKKALEKKISKEELAWILLNFNQKRGYYQLRGEDDDESMKTAKTRQYFDKQIIKNIIDTNQTYKGQRILIVELQNGDKGKIFKKEIPDWIGQEKNIIVTVDIDKDGNDKYEESGSLSCRFKIPTDAEWESEWKLIKMKTQKDLDESNKTVGTYIYDSILQNPTQKVRGKLVRTIERKYYKAELKQILEKQTEFHSELQDKDLYIECLNELYSNNDTHRNAITDRDFVYLFMNDILFYQRPLKSKKSLIDNCPYERNIYIDKETGEIKYSPIKCIAKSHPLFQEFRLWKFISSIRIYQRESVVEVVDKQLDLFSSQSTSVQKLVTDVDVTDKFLTCENDYVALFEWLNKKKIIDQKEFLKYRPFGLKGDIDNYRWNYVEDKSYPCNETHAMILTYFAKAGISEDILTKEMEEALWHILYSVEDRQEITKALRTFASKYHLSDSFVKVFSNIPPFKKEYGSYSAKAIKKLLSLMRMGKYWSEDAIDVNTRERIDKIVTGEYDEKIRDRVREKTIRLNDIRHFRALPDWLACYVVYDRHSETREITEWKSPEEIDEYIRNFKQHSLRNPIVEQVITETLRTVRDIWKQVGCIDEIHVELGREMKNPADKRKRITSQIIENENANLRVKALLTEFVNSEFEIENVRPYSLSQQDILRIYEDGVLNSVAEVPGDIAGILKKFNENDAKKRPTTSEILRYKLWLEQKYRSPYTGEMIPLSKLFTSAYEIEHVIPQSRYFDDSFSNKVICEAEVNKLKDNALGYEFIKKHHGEKVELGFGKIVEIFSVSVYEQFVKDNYSRNRGKMKKLLMDEIPEQFIERQLNDSRYISKVVKTLLSNVVREKAEQEAVSKNVIVCTGGVTDRLKKDWGINDVWNKIVLPRFLRLNELTNSTNFTAKNAAGNEIPAMPLELQKGFNKKRIDHRHHAMDAIVIACANRNIVNYLNNESASRKAKISRHDLQAILCDKVRTDDKGNYQWRVKKPWDTFTQDVYVALENIIVSFKQNLRVINKTSNYYWHYENGKKVLVKQVKGDSWAIRKPMHKDTVFGEVNLRKVKSVSLNEALKNPQFIVEKDLKRQLLSLLQQNFDIKKIKKYFEEHKDIWSDISLSKMNIYYFTKETKDRYFATRKPLDASFDKKKIESCITDTGIQQILLRHLELKENDPERAFSPDGIDEMNRNIIQLNKGKGHHPIAKVRVYEKADKFEVGQRGNKSSKFVEAAKGTNLFFAVYETEYPDEKTNSIVRKRNYATIPLNIAIERQKRGLSTAPEDEKGNVPSFVLSPNDLVYLPTSEDIVNGHITQPIDKSRIYKMVSSSGSQCFFIKHNIANIIVDKYEFSPLNKMERAISNEMIKEICIPVKVDRLGNIVKLGKSE

SEQ ID NO: 302 - protein, 1509 aa, Bacteroides fluxus
MKTILGLDLGTNSVGWAVINSVIKEQAERIWIEMAGSRIIPMDAAVLGDFDKGNSISQTSERTRLRGVRRLRERQLLRRERLHKVLNILGFLPNHYLEYIDFEKHPGKFLSDAEPKLPWVKDEQGKYTFLFQAAFDEMLADFAIHQPSLVSGDKKIPYDWTIYYLRKKALTEMISKEELAWILLNFNQKRGYYQLRGEEEEDNAGKSVEFYALKVLTVEATDEKKGRDVWYNVHLENGWIYRRSSSVPLDWEGQIKEFIVTTDLNPDSTPKLDKYGEVKRSFRAPKEDDWMLIKKRTEADIANTHKTVGAYIYDTLLQKPQQKIIGKLVKTVERKLYRDELSLILQKQCAFHAELQDRTLYARCVEALYPNNEVQRRNIANRDFVYLLMDDVLFYQRPLKTKKSLIANCPYEENEYVDRETGEIKKAPLKCIAKSHPLFQEFRLWNFLSNIRIYQKEKEINGTLHLDVDVTAEFLKTEDDYVALFDWLNSRKEIEQKTFLKYPKFGLKKEISNYRWNYVEDKQYPCNETRHAILSRLEKANVCIDFLSNEKEVALWHILYSVSDKQEIEKALRTFAAKNGLDESFVEAFKKFPPFKSEYGAYSAKAIKKLLPLMRCGKYWDVSSIDDTTKERIKKIVAGEYDERIAVKVRDKVMNLSDISCFKRLPLWLACYIVYNRHSEDKEAVKWESPADIDAYLASFKQHSLRNPIVEQVITETLRVVRDIWKQVGRIDEIHIELGREMKNPADKRKRMTAQILENENANLRIKALLAEFMNPEYEIENVRPYSPSQQEILRIYEDMVLHAEDQLPEEIDAILKKFNSSKVPTKSEFLRYKLWLEQKYRSPYTGELIPLGKLFTAAYEIEHVIPQSRYFDDSFSNKVICESAVNKLKDNQLGYEFIKNHHGQKVEVGFGKSVEIFSVDSYERFVKEQYAKSAVKMKKMLMDDIPEQFIERQLNDSRYISKVIKGLLSNIVREKNDSGEYEPEAVSKNIVVCTGSVTDRLKRDWGMNDVWNSIVYPRFERLNSLTDTQSFGHWENKSGKKVFQTELPLEYQKGFSKKRIDHRHHAMDAIVIACATRNHVNYLSNESASRNAKISRYDLQRLLCDKSRTDDNGNYKWVIKKPWDTFTQDAREVLSKIVVSLKQNLRIINKTTNVYRHLDATGNRVYEKQKTGDSWAIRKPMHKDTVFGAVNLRKVKVVRLSVALDAPTMIVDKRVKNKVFELLSYKYDKKRIEKYFKENAVLWKELDLARVAVYYFTEATTEPLVAVRKPLDSTFNEKKIKESVTDTGIQKILLNHLCTKEGKPDLAFSAEGIEEMNRNLLQLNNGKRHQPIYKVRVYEPRGNKFSVGVLGNKGTKWVEAAKGTNLFFAIYITEDGKRTYETIPLNMVIEREKQGLAPVPDKNEKGDKLLFWLSPNDLVYLPTEEELEFGRINEPIDRGRIYKMVSSSGNQCFFIPQSISNAIIPTKELGANNKAERSWDGAMIKNICIPVKVDRLGRIIEVKYRINE

SEQ ID NO: 303 - protein, 1436 aa, Bacteroides fragilis; identical to SEQ ID NO: 169

SEQ ID NO: 304 - protein, 1512 aa, Bacteroides nordii
MKNILGLDLGTNSIGWAVINSEEDGPIVKKRIELAGSRIIPMDAAVLGNFDSGVTKSQTAERTSFRSIRRLRERQLLRRERLHKVLQILGFLPEHYVNDIDFENHPGKIKRNTEPKLPWRKNSMGQFEFIFQDSFEAMLTDFATHQPVFVSEGKKVPYDWTLYYLRKKALTEGISKEELAWLILNFNQKRGYYQLRGEEEEEQSNKLVEFYALRVVKVEATDDKKGKDTWYNVHLENGWIYRRTSNIPLDWEGKVKEFIVTTDLNEDGTPKLDKYGEVKRSFRAPKEDDWTLIKKKTESDIANSHKTVGCYIYDALLQNPHQKIKGRLVRTVERKFYKEELRLILEKQLSFHPELQDRDLYRACIDALYVSNEAHKNNISGRDFVYLFIDDIIFYQRPLKTKKSLIDNCPYEENQYMDRETGEVKQAPIKCIAKSHPLFQEFRLWQFISNIRIYQRERVLDDGKLETDVDVTPDFLKTEDDYTTLFEWFNDRKEVDQKAFLKNPQFGLKKTFTEYRWNYVEDKSYPCNETRNAILNGLQKAGVSADFLSREVEEALWHILYSVEDKIEIESALRKFASKHDLDDRFADVFKKLPPFKKEYGAYSAKAIKKLLPLMRIGKYWELSNIDDKTKERIDKIITGEWDENIHDRVREKAIKLSDITDFKGLPLWLSCYVVYNRHSEARAIAKWESPEDIDSYLRLFRQHSLRNPIVEQVITETLRTVRDIWKRVGQIDEIHVELGREIKNPADKRAKMTAQIVENENTNLRIKALLAEFINSEYEIENVRPYSSNQQEKLKIYEDTVLNGVKEIPEDINTILKKFRESDLKKRPTKSDFLHYKLWLEQKYCSPYTGRIIPLGKLFTSAYEIEHIIPQAHYFDDSFSNKVICEAEVNGLKDKKLGYEFIKHNPGKMVEIGFGKPPVRIFSVEEYERFVKENYSGIKNKMNKLLMDDIPETFIERQLNDSRYISKVVKSLLSNIVREKDSNGEYEPEAISKNVIVCTGSVTDRLKRDWGVNDVWNSIIYPRFERLNELTGSQQFGCWENKEGKRVFQTAVPLEMQKGFSKKRIDHRHHAMDAIVIACATRNHINYLSNESASKKAKISRTDLQRLLCTKCRTDDNGNYKWIVKKPWPAFTQDIRKALENITVSFKQNLRVINKTTNYYVHFDESGKKVLEKQINGDSWAIRKPMHKDTVFGKVNLQKVKEVRLSLALDTPKMIVDKKLKEKVLQLYSYKYDKKRIDKYFKENASLWKDLNLSKVAVYYFTNDSTEPLVAVRKPLDTSFNAKKIKESVTDTGIQKILLNHLSNNQDDPNLAFSPDGIDKMNKNLTALNDGKYHQPIYKVRVCEPQGNKFSVGTSGNKTSKYVEAAKGTNLFFAVYQTEDGKRSYETIPLNVVIEREKLGWTPVPENNNNGDKLLFWLSPNDLVYVPTADELNNGMRLDNMDKGRIYKMISCSGPQCFFIPQNVSNAIIPVIELGANNKAEKSWNNEMIKVVCVPIRVDRLGCITQINNQK

SEQ ID NO: 305 - protein, 779 aa, Bacteroides oleiciplenus
MKEGNQYDVACEYAGYRHSKSSLTREEIDNKVLKNRLEILPKNSLRNPVVEKILNQMVNVVNAVIDTYGKPDEIRVELARELKKGAKEREELAKSIAQNTREHEAIRQLLQTEFGMMHVTRNDIIRYKLYEELKDNGYKTLYSDQYIPREKVFSKEIDIEHIIPQARLFDDSLSNKTLEYRAVNIEKGNKTAYDFVKEKYGNDGLRRYLNHCEALFKDKKTKLKKLKMEDQDIPDGFIDRDLRNTQYIAKKALSMLSEISRRVVATTGSITDELRKDWQLVDIMKELNLPKYEALGFVETFKDKDGRIIKKIKDWSKRNDHRHHAMDALTVAFTKDVFIQYFNNKNAFWMSGSKEHANITAIKNKYFEKGKALAPIPLELFRTEAKHHLENILVSIKAKNKVVTNNINRTKKKNGENLKLQQTPRGQLHLESIYGSYRQCIIRDEKVNASFDASKIANVSKSAYRNALLKRLEAYDNDPKKAFTGKNSLDKNPVYLDENKMEKVPDRVKIVEFETVYTIRKPIDPKLSIDKVVDARIRTLLKKRLEEYGGDAQRAFSNIEENPIWLNKEKGISVKRVAIRGISNAQALHDKKDKDGNPILDKEGKGIPTDFVNTSNNHHVAIYRKPVVDKMGQVILDENGSPRYELGEDVISFFEAVARVNLRQPVVDKDYKRSEGWQFLFSMKQNEYFVFPNEKTGFNPKEIDLLNPENYALISPNLFRVQKIGLNDYTFRHHLETSIQNNSNELKFITWIRCGKNGINGVIKVRVNHIGQIVSMGEY

SEQ ID NO: 306 - protein, 653 aa, Bacteroides oleiciplenus
MKKILGLDLGSSSIGWALVNEGANDEEKSSIIKLGVRVNPLTVDEAQNFEKGKSITTNADRTLKRGMRRNLQRYKQRREALVEVLKKHEFITAGTLMSEQGNKTTFETYRLRAKAVEEEISLEEFARVLLMINKKRGYKSSRKAKGDEDGVLIDGMDVAKKLYDEDLNPGELCLQLLEAGKKTLPDFYRSDLQDEFDKIWNFQKQFNPESFCDTAKEEVRGKNRTQTWTILSKYFVWTEGDSVWNNEEARTEERIKEYKLVGIKRTTKGYEQKLENYRWRVQALSEQLNPEIIAIVLQEINGQISASSGYLGAISDRSKELFFNHQTVGQSLMSELDKNPNGSLRNKVFYRQDYLDEFNTIWEKQSLYHKELTVELKKEIRDIIIFYQRRLKSQKGLISTCEFEQREIIVEKDGKRKTKIIGCKVIPRSHPLFQEFKIWQTLNDVEVYVADRRTKRKQDRKSTTLFSDTEDILLVEGKRYLYQEEKELLAKELFVRENMKKAEVLKLLFEDPKELDLNFKQIDGNRTGFALFSAYSKMIEKYGYESVNFKNSADEIIEKLQIIFADLGWNTELFSIDLSKDDKELEKQPYFRLWHLLYSFEGDNTPTGNGKLIEALMRLCSVEKEYASVLANVSFQEDYGSLSAKAIKKYYLI

SEQ ID NO: 307 - protein, 1436 aa, Bacteroides sp.
MKRILGLDLGTNSIGWALVDEAENKDERSSIVKLGVRVNPLTVDELTNFEKGKSITTNADRTLKRGMRRNLQRYKLRRETLMEVLKEHKLITEDTILSENGNRTTFETYRLRAKAATEKISLEEFARVLLMINKKRGYKSCRKAKGAEEGTLIDGMDIARELYNNNLTPGELCLQLLDAGKKYLPDFYRSDLQNELDRIWEKQKEYYPEILTEVLKEELRGKKRDAVWAICAKSFVWEEYYTEWNKEKGKTEQQEREHKLEGIYSKRKRDEAKRENLQWRVNGLKEKLSLEQLVIVLQEMNIQINNSSGYLGAISDRSKELYFNKQTVGQYQMEMLDKNPNASLRNMVFYRQDYLDEFNTLWEKQAEYHKELTGELKKEIRDIVIFYQRRLKSQKGLVGFCEFESRQIEVEIDGKKKIKTVGNRVIPRSSPLFQEFKIWQILNNIEVTVVGKKGKRRKQKDNSPTLFDGLDDTEQLELNGSRYLYQEEKELLAQELFVRDKMTKSDVLKLLFDNPQELDLNFKTIDGNKTGYTLFQAYSKMIEMSGHEPVDFKKTVEKVVEHVKAVFDLLNWNTDILGFNSNEELDNQSYYKLWHLLYSFEGDNTPTGNARLVQKITELYGFEKEYAIILANVTFQDDYGSLSAKAIHKILPHLKEGNRYDVACAYAGYKHSESSLTKEEIANKALKDRLTLLPKNNLRNPVVEKILNQMVNVINAIIDTYGKPDEIRVELARELKKNAKEREELTKFIAETTRKHEEFKILLQSEFGLTNVSRTDILRYKLYKELESCGYKTLYSNTYIPREKLFSKEFDIEHIIPQARLFDDSFSNKTLEARSINLEKGNKTAYDFVKEKFGESGADNSLDHYLNNIEDLFKSGKISKTKYNKLKMAEQDIPDGFINRDLRNTQYIAKKALSMLNEISRRVVATSGTITDKLRQDWQLVDVMKELNWEKYKALGLVEYFEDKDGRQIGRIKDWTKRNDHRHHAMDALTVAFTKDIFIQYFNNKNASLNSNTNEYAIKNKYFQNGRAIAPIPLREFRVEAKKHLENTLISIKAKNKVVTGNINKTKKRGGVNKYLQQTPRGQLHLETIYGSGKQYLTKEEKVNASFDMKKIATVSKSAYRDVLLKRLHENDNDPKKAFTGKNSLDKQPIWLDKEQTRKVPEKVKTVTLETIYTVRKEISPDLKVDKVIDAGVRKILTGRLNEYGNDAKKAFSNLDENPIWLNKEKGISIKRVTISGISNAQSLHVKKDKDGKPILDEDSRNIPVDFVNTGNNHHVAVYRRPVIDKRGQLVIDEAGNPKYELEEVVVSFFEAVTRANLGQPIIDKDYKTSEGWQFLFSMKQNEYFVFPNEKTGFNPKEIDLLDAENYGVISPNLFRVQKFAHKNYVFRHHLETTIKDTSSILKGITWIDFRSSKGLDAIVKVRVNHIGQIVSVGEY

SEQ ID NO: 308 - protein, 1510 aa, Bacteroides sp.
MKRILGLDLGTNSIGWALVDSEEQRILGMGSRIIPMDQGVLDTFSGGNPVETQTAARTAYRGTRRLRERALLRRERLIRVLNMMKFLPEHYASQIDFEKRLGQFFDEKEPKLAWKQNDEGRFEFIFQQSFNEMIEEFKNKGVVREDKKIPYDWTIYYLRKKALSQEIEKEELAWILLNFNQKRGYYQLRGEEEEENPNKLVEYYSLKIVDVIADEKPNSKGDIWYSLHLENGWIYRRSSKIPLFGWKDKTRDFIVTTDLNDDGTVKKDKEGIEKRSFRAPSENDWVLLKKKTESDIEKSHKTVGAYVYETLLQNPMQKVRGKLVRTIERKFYKDELKQILEKQREFHPELRDEDLYNDCVRELYRSNETYQFILSKRDFVHLFLDDILFYQRPLRSQKSAIGDCILEFKTYKDKDGNNIKEYLKVISKSNPLYQEFRIWQWLYNLKIYRKEDDEDVTLQFIANIEDKEQLFDFLSNRKSIEQKPLLEYLIKAKGLKKQVKTEAYRWNYVEDKIYPCSETKTMISTRLAKVENIPDNFFTKEIEQKLWHIIYSVTDKNEFEKALRTFAKKYDLDIASFVDNFKKIPPFKNEYGSFSEKAIKKLLPLMRLGKYWKWNDIDNNTQNRISKIITGEYDEEIKDIVREKSIALTNENDFQGLQLWLAQYLVYGRHSEADIAGKWHSVADLEKYLNEFKQHSLRNPIVEQIITETLRVVRDIWRKYGQGAENFFSEIHVELGRDMKNTADERKKIVNVVTENENTNLRIKALLMELKNNSDGKLEVENVRPYSPTQQDILKIYEEYAISTGLDNEKDEKVKEDIKKISRVAQPTTTELQRYKLWLEQKYCSPYTGKVIPLGKLFTEEYQIEHIIPKSRYYDDSFSNKVICEAAVNKLKDKCLGLEFIKNYHGQIVETGFGQKVTIFDEEAYQNFVKQHYAYNRSKRTKLLLEEIPEKMIERQMNDTRYISKFVLPLLSNLVRAEENDNGVNSKNVLPVNGKITTMLKQDWGLNDVWNDLILPRFVRMNELAKTIAFTSWNEQHQKYLPTVPLELSKGFQKKRIDHRHHAMDALVIACATRDHVNLLNNKHANTDTIRYDLQRKLRLFERVTYIDPQTKNNVTKDIPKEFKKPWDNFTVDARNELEKIIVSFKQNLRIINKATNIYTKYENGKKIKVGQKGLNWAIRKPLHKETVFAKVSLRKRKTVRLSEALKDWKKIVDKKLKQEIKRLTCQYGKFDVDTILRYFKDRKYQFGEVDVSKVKMYYFDEENAAVRKNVDTSFTEKFIQGSVTDTGIQKILLNHLEAKGNKVEIAFSPEGIEEMNKNIIQLNEGKLHLPIFKVRVYETIGNKFSVGVKGNKKDKYVEAAKGTNLFFAIYVDENGIRSYETIPLNIVIERLKQGLSVVPEKNRKEHSLLFYLSPNDLVYVPIEDERENIHAVNLDQLNNEQRKRIYKMVSCTGSECHFVPYYVASPIVNKVEYSSLNKIGRSLTGEMIKDVCIKLKVDRLGNVKGISGL

SEQ ID NO: 309 - protein, 1436 aa, Bacteroides sp.
MKRILGLDLGTNSIGWALVNEAENKDERSSIVKLGVRVNPLTVDELTNFEKGKSITTNADRTLKRGMRRNLQRYKLRRETLTEVLKEHKLITEDTILSENGNRTTFETYRLRAKAVTEEISLEEFARVLLMINKKRGYKSSRKAKGVEEGTLIDGMDIARELYNNNLTPGELCLQLLDAGKKFLPDFYRSDLQNELDRIWEKQKEYYPEILTDVLKEELRGKKRDAVWAICAKYFVWKETYTEWNKEKGKTEQQEREHKLEGIYSKRKRDEAKRENLQWRVNGLKEKLSLEQLVIVFQEMNTQINNSSGYLGAISDRSKELYFNKQTVGQYQMEMLDKNPNASLRNMVFYRQDYLDEFNMLWEKQAVYHKELTEELKKEIRDIIIFYQRRLKSQKGLIGFCEFESRQIEVDIDGKKKIKTVGNRVISRSSPLFQEFKIWQILNNIEVTVVGKKRKRRKLKENYSAIFEELNDAEQLELNGSRRLCQEEKELLAQELFVRDKMTKSEVLKLLFDNPQELDLNFKTIDGNKTGYALFQAYSKMIEMSGHEPVDFKKPVEKVVEYIKAVFDLLNWNTDILGFNSNEELDNQSYYKLWHLLYSFEGDNTPTGNGRLIQKMTELYGFEKEYATILANVSFQDDYGSLSAKAIHKILPHLKEGNRYDVACVYAGYRHSESSLTREEIANKVLKDRLMLLPKNSLHNPVVEKILNQMVNVINVIIDIYGKPDEIRVELARELKKNAKEREELTKSIAQTTKANEEYKTLLQTEFGLTNVSRTDILRYKLYKELESCGYKTLYSNTYISREKLFSKEFDIEHIIPQARLFDDSFSNKTLEARSVNIEKGNKTAYDFVKEKFGESGADNSLEHYLNNIEDLFKSGKISKTKYNKLKMAEQDIPDGFIERDLRNTQYIAKKALSMLNEISHRVVATSGSVTDKLREDWQLIDVMKELNWEKYKALGLVEYFEDRDGRQIGRIKDWTKRNDHRHHAMDALTVAFTKDVFIQYFNNKNASLDPNANEHAIKNKYFQNGRAIAPMPLREFRAEAKKHLENTLISIKAKNKVITGNINKTRKKGGVNKNMQQTPRGQLHLETIYGSGKQYLTKEEKVNASFDMRKIETVSKSAYRDALLKRLYENDNDPKKAFAGKNSLDKQPIWLDKEQMRKVPEKVKIVTLEAIYTIRKEISPDLKVDKVIDVGVRKILIDRLNEYGNDAKKAFSNLDKNPIWLNKEKGISIKRVTISGISNAQSLHVKKDKDGKPILDENGRNIPVDFVNTGNNHHVAVYYRPVIDKRGQLVVDEAGNPKYELEEVVVSFFEAVTRANLGLPIIDKDYKTTEGWQFLFSMKQNEYFVFPNEKIGFNPKEIDLLDVENYGLISPNLFRVQKFSLKNYVFRHHLETTIKDTSSILRGITWIDFRSSKGLDTIVKVRVNHIGQIVSVGEY

SEQ ID NO: 310 - protein, 1424 aa, Bacteroides sp.
MKRILGLDLGTNSIGWALVNEAETDEEVSSIIRLGVRVNPLTVDETQNFEKGKSITTNAERTLKRSMRRNLQRYKLRRDALVEFLKELGFITDETILSEQGNRTTFETCRLRAKAAEEEISLEELSRVLLMINKKRGYKSSRKVKKEEDGVLIDGMEIAKKLYEEDLTPGQLCSQLLESGKKVLPDFYHSDLQEELDRIWSVQKQFHPDVFCDAAKEEIKGKNRSQTWAILANYFVWKEEVVGWNDREAKNETIEKECKLVGLKRTTKGYELKKENYRWRAQALTEQLGLEEIAVVLQEINGQINASSGYLGAISDRSKVLYFNHQTVGQYQMAELDKNPHASLRNMVFYRQDYLDEFDRIWEKQAEFHKELTAELKKEIRDMIIFYQRRLKSQKGLISFCEFERLEIVVEKDGKKQTKVIGCKVIPRSHPLFQEFKVWQTLNDIKVLGREKKRNALSASESRALYPEEKEILARELAIKENMKKADVLKLLFENPQELDLNFKQIDGNRTGFSLFSAYSKMIEKYGYEPLDFKKPADEIIGQLRTIFTDLGWNTNLFTIDLTKEGKELEMQPYFRLWHLLYSFEGDNTSTGNGKLIEKIMQLCGVEKEYAVELASLSFQDDYGSLSAKAIKRILPYLKEGNLYDVACEYAGYRHSKSSLTKEEIENKVLKGKLEVLPKNSLRNPVVEKILSQMVNVINTIIDTYGKPDEIRVELARELKKSAKEREELTKAIAKSTREHEEIRKLLQDEFGMMNVSRNDIIRYKLYEELKDNGYKTLYSNQYIPKEKIFSKEIDIEHIIPQSRLFDDSLSNKTLEYKAINIEKGNKTAYDFVKEKYGEEGLQQYINRCESLFNDKKAKLRKLKMEQKDIPDGFIDRDLRNTQYIAKKALAMLNEICRRVVATTGSITDQLREDWQLVDVMKELNLPKYEALGFVETYEDKDGRKIKRIKDWTKRNDHRHHAMDALTVAFTKDAFIQYFNNKNAAQDSGNRNHTNIIGIKTRYFDKGRALPPIPLEQFRIEAKQHLEKLLVSIKAKNKVVTVNVNRTKKRKGENTKIQQTPRGQLHLETVYGSHKQYVTKIEKVNASFDAAKIATVSKRAYRNALLKRLETFGNDPKKAFTGKNALEKNPLYADKYQTIRVPEKVQTVEFETIYTIRKPVDPALNVDKVVDVKVRAILERRLKEYGGDPKKAFVNFWENPIWLNKEKGISIKRVSIRGINNAQSIHVKKDKNGNPIWDENGKQIPVDFVNTGNNHHVAIYRKPVLDKKGQVTFDEDGNLMYELDEVVVPFFEAVTRANLGLPIIDKDYRKSEGWQFLFSMKQNEYFVFPNEKTGFNPKEVDLLNPDNYAMISPNLFRVQTMSKVMYGNNVVRDYKFRHHLETTVKDMKELKDIAYKQYKTLSFGNSVVKIRINHIGQIVSVGEY

SEQ ID NO: 311 - protein, 1055 aa, Bacteroides sp.
MRIYRKDLAQDVDVTNELLKTEEDYVALFDWLNGKKEIDQKAFLKYPLFGLKKEVENYRWNYVQDKPYPCNETRSSMLARLEKCDISIEFLTKENEEALWHILYSVEDKNEIVKALQKFADKHDLNASFVDVFQKFPPFKKEYGSYSAKAIKKLLPLMRMGKYWSENSIDKGTRERMDKIITGEYDEKIENRVREKAIHLADVSDFKGLPLWLVCYIVYGRHSEAKEITQWKSPADIDLYLRSFKQHSLRNPIVEQIIIETLRVVRDIWKQVGNIDEIHVELGREMKNPADKRKKMTQQMSENENTNLRIKYLLTEFLNPEYEVENVRPYSPSQQDILRIYEEGVLNSVSDLPEEISDILKKFTETDLKKRPSRSEVLRYKLWLEQKYRSPYTGEVIPLGKLFTPAYEIEHVIPQSCYFDDSFSNKVICEAEVNKLKSNLLGHEFIVKHHGEIVELPFGKKVRIFTVDEYEQFVKDNYSRTRSKMKKLLMDDIPEEFVARQLNDSRYISKVVKSLLSNIVREKGEEEAISKNVIPCTGGVTDRLKKDWGINEVWNKIILPRFQRLNELTGTNKFTTKNVGIQEIPTMPLELQKGFNKKRIDHRHHAMDAIIIACANRNIINYLNNESATAKAELSRYDLQKMLCDKAKTDNNGNYKWVIRKPWASFTQDTYLALENIIVSFKQNLRVINKATNHFLHYNEEGKKIFVKQGKGDNWAIRKSMHKDTVFGEVNLRRIKTVALNEAMKNPQSIVVKDFKRKLLELWNLGFDAKRIKKYFEDNRETWSDINLSKIEVYYFSKDTKDRFFATRKPLDTSFDRKKIENNITDTGIQKILLRHLELKDNNPDIAFSPDGIDEMNRNIIQLNNGKYHQPIIKVRWYEQADKFAVGQTGNKSSKFVEAAKGTNLFFAVYESNILDKKTNTIIKKRNYATIPLNVAIERQKQGLPVAPEDENGNDPIFVLSPNDLVYLPTAADLANGIIAQPLDRGRIYKMVSCTGNEGYFIPARIANPILQTIELGSNNKAQKAWTDEMIKEICMPIKVDRLGNVLESSSSYKK

SEQ ID NO: 312 - protein, 1055 aa, Bacteroides sp.
MRIYRKDLAQDVDVTNELLKTEEDYVALFDWLNGKKEIDQKAFLKYPVFGLKKEIENYRWNYVQDKPYPCNETRSLMLARLEKCDISIEFLTKENEEALWHILYSVEDKNEIVKALQKFADKHDLNASFVDVFQKFPPFKKEYGSYSAKAIKKLLPLMRMGKYWSENSIDKGTRERIDKIITGEYDEKIENRVREKAIHLADVSDFKGLPLWLVCYIVYGRHSEAKEIIQWKSPADIDSYLRSFKQHSLRNPIVEQIIIETLRVVRDIWKQVGNIDEIHVELGREMKNPADKRKKMTQQMSENENTNLRIKYLLTEFLNPEYEVENVRPYSPSQQDILRIYEEGVLNSVSDLPEEISDILKKFTETDLKKRPSRSEVLRYKLWLEQKYRSPYTGEVIPLGKLFTPAYEIEHVIPQSCYFDDSFSNKVICEAEVNKLKSNLLGHEFIVKHHGEIVELPFGKKVRIFTVDEYEQFVKDNYSRTRSKMKKLLMDDIPEEFVTRQLNDSRYISKVVKSLLSNIVREKGEEEAISKNVIPCTGGVTDRLKKDWGINEVWNKIILPRFQRLNELTGTNKFTTKNVGIQEIPTMPLELQKGFNKKRIDHRHHAMDAIIIACANRNIINYLNNESATAKAELSRYDLQKMLCDKAKTDNNGNYKWVIRKPWASFTQDTYLALENIIVSFKQNLRVINKATNRFLHYNEEGKKIFVKQGKGDNWAIRKSMHKDTVFGEVNLRRIKTVALNEAMKNPQSIVVKDFKRKLLELWNLGFDAKRIKKYFEDNRETWSDINLSKIEVYYFSKDTKDRFFATRKPLDTSFDRKKIENNITDTGIQKILLRHLELKDNNPDIAFSPDGIDEMNRNIIQLNNGKYHQPIIKIRWYEQADKFAVGQTGNKSSKFVEAAKGTNLFFAVYESNILDKKTNTIIKKRNYATIPLNVAIERQKQGLPVAPEDENGNDPIFVLSPNDLVYLPTDDELANGIIAQPLDRGRIYKMVSSSGEQCFFIKHIVANVLVDKFEFSPLNKMERALTGEMIKMICIPIKVDRLGNVLESSSSYKK

SEQ ID NO: 313 - protein, 286 aa, Bacteroides uniformis
MLSYKYDKKKIEKYFKENAFLWKELDIAKVAVYYFTENTTEPLVAVRKSLDSTFNEKKIASVTDTGIQKILLNHLKSKEGKAELAFSAEGIEEMNRNLLQLNDGKGHQPIYKVRVYEPRGNKFKVGVLGNKGAKWVEAAKGTNLFFAIYITEDGNRTYETIPLNWVIEREKQGLVPVPDRNEKGDKLLFWLSPNDLVYLPTEEERDFGRINEPIDRGRIYKMVSSSGNQCFFIPQSISNAIISTKELGSNNKAEKSWDGEMIKNICIPVKVDRLGRIIEVKYRVNE

SEQ ID NO: 314 - protein, 1508 aa, Bacteroides uniformis
MRTILGLDLGTNSIGWAVINSVIKEQTERIWIEMAGSRIIPMDAAILGDFDKGNSISQTAERTRFRGVRRLRERQLLRRERLHKVLKILGFLPEHYLKGIDFEKHTGKFLSGSEPKLPWVKDRWGKYSFLFQTAFNEMLADFAKHQPSLVFDGKKIPYDWTVYYLRKKALTEMISKEELAWILLNFNQKRGYYQLRGEEEEDNAGKSVEFYALKVLSVEATDEKKGRDIWYNVHLENGWVYRRSSNVPLDWEGRVKEFIVTTDLNPDGTPKLDKYGEVKRSFRAPKEDDWMLIKKRTEADITGTHKTIGSYIYDALLQEPQQKIIGKLVKTVERKFYKEELNFILQKQCAFHAELQDRDLYMRCIEALYPGNEVQRRNIANRDFIYLLIDDVLFYQRPLKTKKSLIANCPYEENEYVNRKTGEIKTAPLKCIAKSHPLFQEFRLWYFLSNIRVYQKEREVNGTLHLDVDVTTEFLKTEDDYVALFDWLNSRKEIDQKAFLRYPAFGLKKEINNYRWNYVEDKFYPCNETRHAILSRLEKAGIGIDFLSDEKETALWHILYSVSDKQEIEKALATFAVKNGLNESFVEVFKKFPPFKSEYGAYSAKAIKKLLPLMRCGKYWDMSLIDGTTKERIERIIAGECDESIGAKVREKAMNLSDISCFKRLPLWLACYVVYNRHSEDKEITKWETPADIDAYLAAFKQHSLRNPIVEQVITETLRVVRDIWKQVGKIDEIRIELGREMKNPADKRKRMTTQILENENANLRIKALLAEFVNPEYGVENVRPYSPSQQEILRIYEDAVLKGEEQIPEDIDVILKKFNTSKLPTKSEFLRYKLWLEQKYRSPYTGELIPLAKLFTAAYEIEHVIPQSRYFDDSFSNKVICESAVNKLKDNQLGYEFIKNHHGQKVEVGFGKTVEIFSVDSYERFVKEQYAKSGIKMKKLLMDDIPEQFIERQLNDSRYISKVVKGLLSNIVREKNDSGEYEPEAVSKNILVCTGSVTDRLKKDWGMNDVWNSIVSPRFERLNALTETQCFGHWENKDGKKVFQTAVPLEYQKGFSKKRIDHRHHAMDAIVIACATRNHVNYLNNESASRNAKISRYDLQRLLCDKSRGDGNGNYRWIIKKPWTTFTQDAREALSGIIVSLKQNLRIINKTTNIYQHFDANGTRVYEKQKIGDSWAIRKPMHKDTVFGAVNLRKVKVVRLSVALDTPSMIVNKRVKNKVLELLSYKYDKKKIEKYFKENAFLWKELDIAKVAVYYFTENTTEPLVAVRKSLDSTFNEKKIASVTDTGIQKILLNHLKSKEGKAELAFSAEGIEEMNRNLLQLNDGKGHQPIYKVRVYEPRGNKFKVGVLGNKGAKWVEAAKGTNLFFAIYITEDGNRTYETIPLNWVIEREKQGLVPVPDRNEKGDKLLFWLSPNDLVYLPTEEERDFGRINEPIDRGRIYKMVSSSGNQCFFIPQSISNAIISTKELGSNNKAEKSWDGEMIKNICIPVKVDRLGRIIEVKYRVNE

SEQ ID NO: 315 - protein, 1210 aa, Bacteroides uniformis
MRTILGLDLGTNSIGWAVINSVIKEQTERIWIEMAGSRIIPMDAAILGDFDKGNSISQTAERTRFRGVRRLRERQLLRRERLHKVLKILGFLPEHYLKGIDFEKHTGKFLSGSEPKLPWVKDRWGKYSFLFQTAFNEMLADFAKHQPSLVFDGKKIPYDWTVYYLRKKALTEMISKEELAWILLNFNQKRGYYQLRGEEEEDNAGKSVEFYALKVLSVEATDEKKGRDIWYNVHLENGWVYRRSSNVPLDWEGRVKEFIVTTDLNPDGTPKLDKYGEVKRSFRAPKEDDWMLIKKRTEADITGTHKTIGSYIYDALLQEPQQKIIGKLVKTVERKFYKEELNFILQKQCAFHAELQDRDLYMRCIEALYPGNEVQRRNIANRDFIYLLIDDVLFYQRPLKTKKSLIANCPYEENEYVNRKTGEIKTAPLKCIAKSHPLFQEFRLWYFLSNIRVYQKEREVNGTLHLDVDVTTEFLKTEDDYVALFDWLNSRKEIDQKAFLRYPAFGLKKEINNYRWNYVEDKFYPCNETRHAILSRLEKAGIGIDFLSDEKETALWHILYSVSDKQEIEKALATFAVKNGLNESFVEVFKKFPPFKSEYGAYSAKAIKKLLPLMRCGKYWDMSLIDGTTKERIERIIAGECDESIGAKVREKAMNLSDISCFKRLPLWLACYVVYNRHSEDKEITKWETPADIDAYLAAFKQHSLRNPIVEQVITETLRVVRDIWKQVGKIDEIRIELGREMKNPADKRKRMTTQILENENANLRIKALLAEFVNPEYGVENVRPYSPSQQEILRIYEDAVLKGEEQIPEDIDVILKKFNTSKLPTKSEFLRYKLWLEQKYRSPYTGELIPLAKLFTAAYEIEHVIPQSRYFDDSFSNKVICESAVNKLKDNQLGYEFIKNHHGQKVEVGFGKTVEIFSVDSYERFVKEQYAKSGIKMKKLLMDDIPEQFIERQLNDSRYISKVVKGLLSNIVREKNDSGEYEPEAVSKNILVCTGSVTDRLKKDWGMNDVWNSIVSPRFERLNALTETQCFGHWENKDGKKVFQTAVPLEYQKGFSKKRIDHRHHAMDAIVIACATRNHVNYLNNESASRNAKISRYDLQRLLCDKSRGDGNGNYRWIIKKPWTTFTQDAREALSGIIVSLKQNLRIINKTTNIYQHFDANGTRVYEKQKIGDSWAIRKPMHKDTVFGAVNLRKALIPQHYNLTLFISS

SEQ ID NO: 316 - protein, 1504 aa, Bacteroides vulgatus
MKNIVGLDLGTNSIGWAVVNGSVNDDGSEQLVKIQASGSRIIPMDAAMIGDFNKGNSISQTAERTRLRGVRRLSERYLLRRERLHRILDILGFLPFHFAQDLDRHGKIVKGKEPKLAWRKNEAGQFEFIFQDSFKEMLEDFKLNHPNLITDDKKVPYDWTIYYLRKKGLTSKISKEELAWILLNFNQKRGYYQLRGEEEEENKNKLVEFYALKVVAVEDSGEKKGKDIWYNVHLENGWVYRRTSNMPLDWVGKTKEFIVTTDLEKDGTPKKDKEGNVKRSFRAPKEDDWSLLKKKTEADIDQTHKTVGVYIYDTLLGNPSQKIRGRLVRTIERKYYKEELKQILEKQKEFHLELQDRALYAACIEELYPINEAHRNNVGNRDFTYLFLEDILFYQRPLKSKKSLIDNCPYEENQGLDKETGEIKSFPVKCIAKSHPLFQEFRLWQFIVNLRIYRKDLAQDVDVTNELLKTEEDYVALFDWLNGKKEIDQKAFLKYPVFGLKKEIENYRWNYVQDKPYPCNETRSLMLARLEKCDISIEFLTKENEEALWHILYSVEDKNEIVKALQKFADKHDLNASFVDVFQKFPPFKKEYGSYSAKAIKKLLPLMRMGKYWSENSIDKGTRERIDKIITGEYDEKIENRVREKAIHLADVSDFKGLPLWLVCYIVYGRHSEAKEITQWKSPADIDSYLRSFKQHSLRNPIVEQIIIETLRVVRDIWKQVGNIDEIHVELGREMKNPADKRKKMTQQMSENENTNLRIKYLLTEFLNPEYEVENVRPYSPSQQDILRIYEEGVLNSVSDLPEEISDILKKFTETDLKKRPSRSEILRYKLWLEQKYRSPYTGEVIPLGKLFTPAYEIEHVIPQSCYFDDSFSNKVICEAEVNKLKSNLLGHEFIVKHHGEIVELPFGKKVRIFTVDEYEQFVKDNYSRTRSKMKKLLMDDIPEEFVTRQLNDSRYISKVVKSLLSNIVREKGEEEAISKNVIPCTGGVTDRLKKDWGINEVWNKIILPRFQRLNELTGTNKFTTKNVGIQEIPTMPLELQKGFNKKRIDHRHHAMDAIIIACANRNIINYLNNESATAKAELSRYDLQKMLCDKAKTDNNGNYKWVIRKPWASFTQDTYLALENIIVSFKQNLRVINKATNRFLHYNEEGKKIFVKQGKGDNWAIRKSMHKDTVFGEVNLRRIKTVALNEAMKNPQSIVVKDFKRKLLELWNLGFDAKRIKKYFEDNRETWSDINLSKIEVYYFSKDTKDRFFATRKPLDTSFDRKKIENNITDTGIQKILLRHLELKDNNPDIAFSPDGIDEMNRNIIQLNNGKYHQPIIKIRWYEQADKFAVGQTGNKFSKFVEAAKGTNLFFAVYESNILDKKTNTIIKKRNYATIPLNVAIERQKQGLPVAPEDENGNDPIFVLSPNDLVYLPTDDELANGIIAQPLDRGRIYKMVSCTGNEGHFIPARIANPILQTIELGSNNKAQKAWTDEMIKEICMPIKVDRLGNVLESSSSYKK

SEQ ID NO: 317 - protein, 1153 aa, Barnesiella intestinihominis
MKNILGLDLGLSSIGWSVIRENSEEQELVAMGSRVVSLTAAELSSFTQGNGVSINSQRTQKRTQRKGYDRYQLRRTLLRNKLDTLGMLPDDSLSYLPKLQLWGLRAKAVTQRIELNELGRVLLHLNQKRGYKSIKSDFSGDKKITDYVKTVKTRYDELKEMRLTIGELFFRRLTENAFFRCKEQVYPRQAYVEEFDCIMNCQRKFYPDILTDETIRCIRDEIIYYQRPLKSCKYLVSRCEFEKRFYLNAAGKKTEAGPKVSPRTSPLFQVCRLWESINNIVVKDRRNEIVFISAEQRAALFDFLNTHEKLKGSDLLKLLGLSKTYGYRLGEQFKTGIQGNKTRVEIERALGNYPDKKRLLQFNLQEESSSMVNTETGEIIPMISLSFEQEPLYRLWHVLYSIDDREQLQSVLRQKFGIDDDEVLERLSAIDLVKAGFGNKSSKAIRRILPFLQLGMNYAEACEAAGYNHSNNYTKAENEARALLDRLPAIKKNELRQPVVEKILNQMVNVVNALMEKYGRFDEIRVELARELKQSKEERSNTYKSINKNQRENEQIAKRIVEYGVPTRSRIQKYKMWEESKHCCIYCGQPVDVGDFLRGFDVEVEHIIPKSLYFDDSFANKVCSCRSCNKEKNNRTAYDYMKSKGEKALSDYVERVNTMYTNNQISKTKWQNLLTPVDKISIDFIDRQLRESQYIARKAKEILTSICYNVTATSGSVTSFLRHVWGWDTVLHDLNFDRYKKVGLTEVIEVNHRGSVIRREQIKDWSKRFDHRHHAIDALTIACTKQAYIQRLNNLRAEEGPDFNKMSLERYIQSQPHFSVAQVREAVDRILVSFRAGKRAVTPGKRYIRKNRKRISVQSVLIPRGALSEESVYGVIHVWEKDEQGHVIQKQRAVMKYPITSINREMLDKEKVVDKRIHRILSGRLAQYNDNPKEAFAKPVYIDKECRIPIRTVRCFAKPAINTLVPLKKDDKGNPVAWVNPGNNHHVAIYRDEDGKYKERTVTFWEAVDRCRVGIPAIVTQPDTIWDNILQRNDISENVLESLPDVKWQFVLSLQQNEMFILGMNEEDYRYAMDQQDYALLNKYLYRVQKLSKSDYSFRYHTETSVEDKYDGKPNLKLSMQMGKLKRVSIKSLLGLNPHKVHISVLGEIKEIS

SEQ ID NO: 318 - protein, 1352 aa, Belliella baltica
MKKILGLDLGTTSIGWAFIKEPEKDVVGSEIVDMGVRIVPLSSDEENDFAKGNTISINADRTLKRGARRNLQRFKQRRNALLEIFKEKKLISTNFKYAEDGPSSTFSTLNLRAKAAKEKIELQDLVKVLLQINKKRGYKSSRKAKSEEDDGSAIDSMGIAKELYENDLTPGQWVYEALQKGRKNVPDFYRSDLQEEFKKIVNYQSEFFPDIFNASFVEDWMGKASTPTKQYFNKKGVQLAENKGKREERRLQEYKWRAEAVNFKIDLSEIALILSQINSQISNSSGYLGAISDRSKELYFKNLTVGQYLYQQIKKNPHTRLKGQVFYRQDYLDEFERIWSVQSSFYPQLNDALKREVRDITIFFQRRLKSQKHLISNCEFEDHHKVVPKSHPVFQEFRIWQNLNNLLLIKKDNLNEKFDLELESKIALANELAFKRELNVKDALKILGLKPNEWEFNFTKIEGNRTNQAFFDAFAKIIELEDGEPIDLGDLKADDILDQFSEAFLRIGIDTELLQVNSDIEGAEYEKQSYIQFWHLLYSSEDDQKLKLNLIRKFGFKPEHAKILASISLQDDHASLSSRAIKKILPHLQSGLIYDKACTYAGYNHSSSFTKDENEKRELRAELELLKKNSLRNPVVEKILNQMINVVNAILKDPELGRPDEIRVEMARELKANAEQRKNMTSNIASATRDHDKYREILKSEFGLKRVTKNDLLRYKLWLETDGISLYTGKPIEASKLFSKEYDIEHIIPKARLFDDSFSNKTICERQLNIDKANVTAFSFLQNKLSADEFEQYQSRVKSLYGKLSKAKIQKLLMANDKIPEDFIARQLQETRYISKKAKEILFEISRRVSVTTGTITDKLREDWGLVEIMKELNWEKYDKLGLTYTIEGKHGERLNKIKDWSKRNDHRHHAMDALTVALTKPAYIQYLNNLNAKGLNNKKGTEVFAIEQKYLKRENGKLCFIPPIENIRSEAKKHLSRILVSYKAKNKVVTINKNKTKSKAGLNEQIALTPRGQLHKETVYGKSFHYSTKFEKIGASFNVQKINTVAKKEEREALLKRLAENGNDPKKAFTGKNTLNKMPIYLDLGKNIKLSEKVKTVVLEQNYTIRKNIDPDLKVDKVIDVGIKRILESRLEEFGGNAKLAFSNLEENPIWLNKEKGISIKRVKISGVSNVESLHVKKDHFGEPILDQEGNEIPVDFVSTGNNHHVAIYEDENGNLQEEVVSFFEAVVRQNQGLPIIKKNHTLGWKFLFTLKQNEYFVFPSDDFVPADVDLMDEQNYHLISPNLFRVQKIARKNYVFNNHLETKAVDNDLLKSKKELSKITYHFYQTPEHLRGIIKIRINHLGKIIQIGEY

SEQ ID NO: 319 - protein, 1415 aa, Bergeyella zoohelcum
MKHILGLDLGTNSIGWALIERNIEEKYGKIIGMGSRIVPMGAELSKFEQGQAQTKNADRRTNRGARRLNKRYKQRRNKLIYILQKLDMLPSQIKLKEDFSDPNKIDKITILPISKKQEQLTAFDLVSLRVKALTEKVGLEDLGKIIYKYNQLRGYAGGSLEPEKEDIFDEEQSKDKKNKSFIAFSKIVFLGEPQEEIFKNKKLNRRAIIVETEEGNFEGSTFLENIKVGDSLELLINISASKSGDTITIKLPNKTNWRKKMENIENQLKEKSKEMGREFYISEFLLELLKENRWAKIRNNTILRARYESEFEAIWNEQVKHYPFLENLDKKTLIEIVSFIFPGEKESQKKYRELGLEKGLKYIIKNQVVFYQRELKDQSHLISDCRYEPNEKAIAKSHPVFQEYKVWEQINKLIVNTKIEAGTNRKGEKKYKYIDRPIPTALKEWIFEELQNKKEITFSAIFKKLKAEFDLREGIDFLNGMSPKDKLKGNETKLQLQKSLGELWDVLGLDSINRQIELWNILYNEKGNEYDLTSDRTSKVLEFINKYGNNIVDDNAEETAIRISKIKFARAYSSLSLKAVERILPLVRAGKYFNNDFSQQLQSKILKLLNENVEDPFAKAAQTYLDNNQSVLSEGGVGNSIATILVYDKHTAKEYSHDELYKSYKEINLLKQGDLRNPLVEQIINEALVLIRDIWKNYGIKPNEIRVELARDLKNSAKERATIHKRNKDNQTINNKIKETLVKNKKELSLANIEKVKLWEAQRHLSPYTGQPIPLSDLFDKEKYDVDHIIPISRYFDDSFTNKVISEKSVNQEKANRTAMEYFEVGSLKYSIFTKEQFIAHVNEYFSGVKRKNLLATSIPEDPVQRQIKDTQYIAIRVKEELNKIVGNENVKTTTGSITDYLRNHWGLTDKFKLLLKERYEALLESEKFLEAEYDNYKKDFDSRKKEYEEKEVLFEEQELTREEFIKEYKENYIRYKKNKLIIKGWSKRIDHRHHAIDALIVACTEPAHIKRLNDLNKVLQDWLVEHKSEFMPNFEGSNSELLEEILSLPENERTEIFTQIEKFRAIEMPWKGFPEQVEQKLKEIIISHKPKDKLLLQYNKAGDRQIKLRGQLHEGTLYGISQGKEAYRIPLTKFGGSKFATEKNIQKIVSPFLSGFIANHLKEYNNKKEEAFSAEGIMDLNNKLAQYRNEKGELKPHTPISTVKIYYKDPSKNKKKKDEEDLSLQKLDREKAFNEKLYVKTGDNYLFAVLEGEIKTKKTSQIKRLYDIISFFDATNFLKEEFRNAPDKKTFDKDLLFRQYFEERNKAKLLFTLKQGDFVYLPNENEEVILDKESPLYNQYWGDLKERGKNIYVVQKFSKKQIYFIKHTIADIIKKDVEFGSQNCYETVEGRSIKENCFKLEIDRLGNIVKVIKR

SEQ ID NO: 320 - protein, 1430 aa, Bergeyella zoohelcum
MKHILGLDLGTNSIGWAVVKEAQNDNEQSEIVDVGVRVNPLTTDEKTNFEKGKPISTNADRTLKRSARRNLQRYKLRRKELIELLKEHQLISTDTILTENGKGTTFQTLELRAKSAKEKISLEELARVFLTINKKRGYKSSRKAKNEDEGQLIDGMEIAKRLYEENLTTGQLSLQLLKEGKKSLPDYYRSDLQFELDKVWNFQKQFHSDILTDEFYAQLKGKGQRATSALFLAKYQIYTAENKGSREDKKLQAYQWRVDALSKELTREQLAFVITEINNNLNNSSGYLGAISDRSKELYFNNETVGEYLWKQIAANPHTSLKNQVFYRQDYLDEFEQIWKTQSAFYPEILTDELKKELRDVVIFYQRKLKSQKSLVSFCEFENKEIEIKKEDGTSTKKVIGLKVAPKSSPLFQEFKIWQNLNNVLIRKKGSKTKKVAKNQQAVLFEEEKTISELDLEAKQALFNELNLKGNLKADYCLEILGYSPKEWEMNYSVLEGNRTNKALYEAYLKITDLEGYDAKNHLKVKLNKDEVELDDLKVPASEIKDMVQAIFKEAGINTDILHFNAELDGKDFENQASYQLWHLLYSYEGDDSKSGNELLYKLLETKFGFKKEYAQILANVSLSDDYGSLSTKAMRKIHPYIKENKFSTACELAGYRHSKHSLTKEENDNRVLKDSLEVLKKNSLRQPVVEKILNQMINLVNALLKKYRTENPNFKFDEIRIELARELKKNAEERANMTANINKAKTEHEKIIKILKNEFGLPNPTRNDIIRYRLYEELKANGYKDLYTNIKIPQEKLFTKEIDIEHIIPKSRVFDDSFSNKTLSFRKTNLDKGERTAFDYMESKFGADKLEEYVARVEDLYKNNIISKAKYQKLLKKESEIGDGFVERDLRETQYIAKKAKEILLQITPNVLSTSGGITDRLREDWDLINVMKELNLPKYRALGLTQMEDRKYGQQVEVITDWTKRNDHRHHAMDALTVAFTKHNHIQYLNYLNARKNEKHKEHSNIMGIQQLETIKVTDKNGNEKRVFKAPMPNFRQVTKAFLENILISHKAKNKVVTKNKNKVAGSNKVQEVLTPRGQLHKETVYGKYQYYVQKEEKIGAKFDLETIKKVANPLYQSLLKKRLEENGGDPKKAFTGKNSLAKNPIYLDDTQTEQLPEKVKLVWLENSFSIRKDITPENFKDEKLIDKILDEGVKRILKERLQSFGNDAKKAFSDLDKNPIWLNKEKGITIKRVTISGVANAEPLHTKKDHLGKEILDKEGKPIPVDFISTGSNHHVAVYRDEKGNLQEKVVSVFEAVVRANQGLPIIDKTYNQHLGWEFLFTMKQNEMFVFPNESTGFNPNDIDLLDPKNKRIISPNLFRVQKFSKLQYGNSFVREFVFRHHLETTVEDRKELQGITYKQMKNSTFFNDIIKVRINHLGDIVSIGEY

SEQ ID NO: 321 - protein, 1281 aa, Bifidobacterium bifidum
MEDDSQHDIREIYLAIHHMVKYRGNFLVEGTLESSNAFKEDELLKLLGRITRYEMSEGEQNSDIEQDDENKLVAPANGQLADALCATRGSRSMRVDNALEALSAVNDLSREQRAIVKAIFAGLEGNKLDLAKIFVSKEFSSENKKILGIYFNKSDYEEKCVQIVDSGLLDDEEREFLDRMQGQYNAIALKQLLGRSTSVSDSKCASYDAHRANWNLIKLQLRTKENEKDINENYGILVGWKIDSGQRKSVRGESAYENMRKKANVFFKKMIETSDLSETDKNRLIHDIEEDKLFPIQRDSDNGVIPHQLHQNELKQIIKKQGKYYPFLLDAFEKDGKQINKIEGLLAFRVPYFVGPLVVPEDLQKSDNSENHWMVRKKKGEITPWNFDEMVDKDASGRKFIERLVGTDSYLLGEPTLPKNSLLYQEYEVLNELNNVRLSVRTGNHWNDKRRMRLGREEKTLLCQRLFMKGQTVTKRTAENLLRKEYGRTYELSGLSDESKFTSSLSTYGKMCRIFGEKYVNEHRDLMEKIVELQTVFEDKETLLHQLRQLEGISEADCALLVNTHYTGWGRLSRKLLTTKAGECKISDDFAPRKHSIIEIMRAEDRNLMEIITDKQLGFSDWIEQENLGAENGSSLMEVVDDLRVSPKVKRGIIQSIRLIDDISKAVGKRPSRIFLELADDIQPSGRTISRKSRLQDLYRNANLGKEFKGIADELNACSDKDLQDDRLFLYYTQLGKDMYTGEELDLDRLSSAYDIDHIIPQAVTQNDSIDNRVLVARAENARKTDSFTYMPQIADRMRNFWQILLDNGLISRVKFERLTRQNEFSEREKERFVQRSLVETRQIMKNVATLMRQRYGNSAAVIGLNAELTKEMHRYLGFSHKNRDINDYHHAQDALCVGIAGQFAANRGFFADGEVSDGAQNSYNQYLRDYLRGYREKLSAEDRKQGRAFGFIVGSMRSQDEQKRVNPRTGEVVWSEEDKDYLRKVMNYRKMLVTQKVGDDFGALYDETRYAATDPKGIKGIPFDGAKQDTSLYGGFSSAKPAYAVLIESKGKTRLVNVTMQEYSLLGDRPSDDELRKVLAKKKSEYAKANILLRHVPKMQLIRYGGGLMVIKSAGELNNAQQLWLPYEEYCYFDDLSQGKGSLEKDDLKKLLDSILGSVQCLYPWHRFTEEELADLHVAFDKLPEDEKKNVITGIVSALHADAKTANLSIVGMTGSWRRMNNKSGYTFSDEDEFIFQSPSGLFEKRVTVGELKRKAKKEVNSKYRTNEKRLPTLSGASQP

SEQ ID NO: 322 - protein, 1121 aa, Bifidobacterium dentium
MSVGLAAIEVDETGFPIRILNIQSVIHDGGIDPQLGKKKSISRKAISGVARRTRRMRRRKVVRLRQLDATLESLGFPIVEPDSLDTWEIWLTRAKLASSYIQDDETRKEDVSIALRHIARHRGWRNPYSNVESLFVDVAPSEQYEELRRKAEEKLGTSLSGNPTSAEIVECILKRQVGEVQLRTRSRKGVNGNAVEKEGLLPTKLMQSDNAAEIRRIFKVQRIDDETGRKLLRAVFKACSPKGSVERRVGRDALAPGLPRALKASLAFQEYRIANVLTNLVISEDGTKRKLTIAEKQRVFGFLSSNETDDITWIDVAEKLGLERRQIQGVGCLTADGEERISSTPPRNITALHIHSAKPVIREKLVAWWKAASPTVRETMVELLSNTVDIDRVREDMDYSSAVAFIDSLGDEELTALDSVDLLSGRAAYSRQTLKQLTERMLNTDDDLHEARKAVFGVDDNWKPPVDAISTSVGNPAVDRVLKIVNRYLLACQKRWRNPQSVQIEHVRESFSSVAKAKETERVQGERARYRNDLRRELCEQEGLNKIRESDIRRWESVQRQNGTCLYCGSPITFRTCEMDHIVPRKGVGSTNTRVNLAAACAACNKLKSNTAFSVWARTEGAANRKVSQRDAIERVKTFIFNKSVPPREQRAFKQAVISRLRQAESDPAIDNRSIESVAWMADELHRRIEAYFNQDADVSGNTPATQVWVFQGRVTALARKASGIEGRIHFAGEWKKTRLDRRHHAVDAAVIAMMNHSAAQTLVERDSLRLSQWITRKPETWKNYPFSEGQKKTRFKEWLDCMNALLDLLNDALDSDRVPVTRCQRMSLGNSQAHAATIRKMKRVELFSPMDADLIRRASTPALYCALTRLPEYSPEKGLPENRGREIVLNGRHIRSTETVDFFASGAAQLMVRNGSAEIGDSIHHMRIYRYRKTGAKSQEYVYGMIRVFQIDLLHASSENLFAVQLPSQSVSVRYGDKNVVQAIQEGRAEYLGHIVPNDEILISYEGVRMKDSEKIGAYANDFSGTASELAQRRHWVVVGSDVSKLALRPSYLSEEGLENSGSESERLSKQTRKVIEGKGWVVAVNILAKYHPVVIRRNALGEPRFRTNSGMPVSWRWDR

SEQ ID NO: 323 - protein, 354 aa, Bifidobacterium longum
AKQYVNSASIDDAEAETMKTTVSVFQGRVTASARRAAGIEGKIHFIGQQSKTRLDRRHHAVDASVIAMMNTAAAQTLMERESLRESQRLIGLMPGERSWKEYPYEGTSRYESFHLWLDNMDVLLELLNDALDNDRIAVMQSQRYVLGNSIAHDATIHPLEKVPLGSAMSADLIRRASTPALWCALTRLPDYDEKEGLPEDSHREIRVHDTRYSADDEMGFFASQAAQIAVQEGSADIGSAIHHARVYRCWKTNAKGVRKYFYGMIRVFQTDLLRACHDDLFTVPLPPQSISMRYGEPRVVQALQSGNAQYLGSLVVGDEIEMDFSSLDVDGQIGEYLQFFSQFSGGNLAWKHWV

SEQ ID NO: 324 - protein, 1124 aa, Bifidobacterium longum
LTGHSGHTFWPTSSSPPIQLEQEKRPLPQRNTSQNGHTFWPITRERCFMRGKRYRIGIDVGLNSVGLAAVEVSDENSPVRLLNAQSVIHDGGVDPQKNKEAITRKNMSGVARRTRRMRRRKRERLHKLDMLLGKFGYPVIEPESLDKPFEEWHVRAELATRYIEDDELRRESISIALRHMARHRGWRNPYRQVDSLISDNPYSKQYGELKEKAKAYNDDATAAEEESTPAQLVVAMLDAGYAEAPRLRWRTGSKKPDAEGYLPVRLMQEDNANELKQIFRVQRVPADEWKPLFRSVFYAVSPKGSAEQRVGQDPLAPEQARALKASLAFQEYRIANVITNLRIKDASAELRKLTVDEKQSIYDQLVSPSSEDITWSDLCDFLGFKRSQLKGVGSLTEDGEERISSRPPRLTSVQRIYESDNKIRKPLVAWWKSASDNEHEAMIRLLSNTVDIDKVREDVAYASAIEFIDGLDDDALTKLDSVDLPSGRAAYSVETLQKLTRQMLTTDDDLHEARKTLFNVTDSWRPPADPIGEPLGNPSVDRVLKNVNRYLMNCQQRWGNPVSVNIEHVRSSFSSVAFARKDKREYEKNNEKRSIFRSSLSEQLRADEQMEKVRESDLRRLEAIQRQNGQCLYCGRTITFRTCEMDHIVPRKGVGSTNTRTNFAAVCAECNRMKSNTPFAIWARSEDAQTRGVSLAEAKKRVTMFTFNPKSYAPREVKAFKQAVIARLQQTEDDAAIDNRSIESVAWMADELHRRIDWYFNAKQYVNSASIDDAEAETMKTTVSVFQGRVTASARRAAGIEGKIHFIGQQSKTRLDRRHHAVDASVIAMMNTAAAQTLMERESLRESQRLIGLMPGERSWKEYPYEGTSRYESFHLWLDNMDVLLELLNDALDNDRIAVMQSQRYVLGNSIAHDATIHPLEKVPLGSAMSADLIRRASTPALWCALTRLPDYDEKEGLPEDSHREIRVHDTRYSADDEMGFFASQAAQIAVQEGSADIGSAIHHARVYRCWKTNAKGVRKYFYGMIRVFQTDLLRACHDDLFTVPLPPQSISMRYGEPRVVQALQSGNAQYLGSLVVGDEIEMDFPVSMLMVRLASIYNSSRSLVEGTLHGNIGLLMDSLTRRS

SEQ ID NO: 325 - protein, 166 aa, Bifidobacterium longum
MGLAAVEVSDENSPVRLLNAQSVIHDGGVDPQKNKEAITRKNMSGVARRTRRMRRRKRERLHKLDMLLGKFGYPVIEPESLDKPFEEWHVRAELATRYIEDDELRRESISIALRHMARHRGWRNPYRQVDSLISDNPYSKQYGELKEKAKAYNDDATAAEEESTPA

SEQ ID NO: 326 - protein, 1138 aa, Bifidobacterium longum
MNSVGLAAVEVSDENSPVRLLNAQSVIHDGGVDPQKNKEAITRKNMSGVARRTRRMRRRKRERLHKLDMLLGKFGYPVIEPESLDKPFEEWHVRAELATRYIEDDELRRESISIALRHMARHRGWRNPYRQVDSLISDNPYSKQYGELKEKAKAYNDDATAAEEESTPAQLVVAMLDAGYAEAPRLRWRTGSKKPDAEGYLPVRLMQEDNANELKQIFRVQRVPADEWKPLFRSVFYAVSPKGSAEQRVGQDPLAPEQARALKASLAFQEYRIANVITNLRIKDASAELRKLTVDEKQSIYDQLVSPSSEDITWSDLCDFLGFKRSQLKGVGSLTEDGEERISSRPPRLTSVQRIYESDNKIRKPLVAWWKSASDNEHEAMIRLLSNTVDIDKVREDVAYASAIEFIDGLDDDALTKLDSVDLPSGRAAYSVETLQKLTRQMLTTDDDLHEARKTLFNVTDSWRPPADPIGEPLGNPSVDRVLKNVNRYLMNCQQRWGNPVSVNIEHVRSSFSSVAFARKDKREYEKNNEKRSIFRSSLSEQLRADEQMEKVRESDLRRLEAIQRQNGQCLYCGRTITFRTCEMDHIVPRKGVGSTNTRTNFAAVCAECNRMKSNTPFAIWARSEDAQTRGVSLAEAKKRVTMFTFNPKSYAPREVKAFKQAVIARLQQTEDDAAIDNRSIESVAWMADELHRRIDWYFNAKQYVNSASIDDAEAETMKTTVSVFQGRVTASARRAAGIEGKIHFIGQQSKTRLDRRHHAVDASVIAMMNTAAAQTLMERESLRESQRLIGLMPGERSWKEYPYEGTSRYESFHLWLDNMDVLLELLNDALDNDRIAVMQSQRYVLGNSIAHDATIHPLEKVPLGSAMSADLIRRASTPALWCALTRLPDYDEKEGLPEDSHREIRVHDTRYSADDEMGFFASQAAQIAVQEGSADIGSAIHHARVYRCWKTNAKGVRKYFYGMIRVFQTDLLRACHDDLFTVPLPPQSISMRYGEPRVVQALQSGNAQYLGSLVVGDEIEMDFSSLDVDGQIGEYLQFFSQFSGGNLAWKHWVVDGFFNQTQLRIRPRYLAAEGLAKAFSDDVVPDGVQKIVTKQGWLPPVNTASKTAVRIVRRNAFGEPRLSSAHHMPCSWQWRHE

SEQ ID NO: 327 - protein, 182 aa, Bifidobacterium longum
MRGKRYRIGIDVGLNSVGLAAVEVSDENSPVRLLNAQSVIHDGGVDPQKNKEAITRKNMSGVARRTRRMRRRKRERLHKLDMLLGKFGYPVIEPESLDKPFEEWHVRAELATRYIEDDELRRESISIALRHMARHRGWRNPYRQVDSLISDNPYSKQYGELKEKAKAYNDDATAAEEESTPA

SEQ ID NO: 328 - protein, 441 aa, Bifidobacterium longum
MVAMLDAGYAEAPRLRWRTGSKKPDAEGYLPVRLMQEDNANELKQIFRVQRVPADEWKPLFRSVFYAVSPKGSAEQRVGQDPLAPEQARALKASLAFQEYRIANVITNLRIKDASAELRKLTVDEKQSIYDQLVSPSSEDITWSDLCDFLGFKRSQLKGVGSLTEDGEERISSRPPRLTSVQRIYESDNKIRKPLVAWWKSASDNEHEAMIRLLSNTVDIDKVREDVAYASAIEFIDGLDDDALTKLDSVDLPSGRAAYSVETLQKLTRQMLTTDDDLHEARKTLFNVTDSWRPPADPIGEPLGNPSVDRVLKNVNRYLMNCQQRWGNPVSVNIEHVRSSFSSVAFARKDKREYEKNNEKRSIFRSSLSEQLRADEQMEKVRESDLRRLEAIQRQNGQCLYCGRTITFRTCEMDHIVPRKGVGSTNTRTNFAAVCAECNRM

SEQ ID NO: 329 - protein, 967 aa, Bifidobacterium longum
MVAMLDAGYAEAPRLRWRTGSKKPDAEGYLPVRLMQEDNANELKQIFRVQRVPADEWKPLFRSVFYAVSPKGSAEQRVGQDPLAPEQARALKASLAFQEYRIANVITNLRIKDASAELRKLTVDEKQSIYDQLVSPSSEDITWSDLCDFLGFKRSQLKGVGSLTEDGEERISSRPPRLTSVQRIYESDNKIRKPLVAWWKSASDNEHEAMIRLLSNTVDIDKVREDVAYASAIEFIDGLDDDALTKLDSVDLPSGRAAYSVETLQKLTRQMLTTDDDLHEARKTLFNVTDSWRPPADPIGEPLGNPSVDRVLKNVNRYLMNCQQRWGNPVSVNIEHVRSSFSSVAFARKDKREYEKNNEKRSIFRSSLSEQLRADEQMEKVRESDLRRLEAIQRQNGQCLYCGRTITFRTCEMDHIVPRKGVGSTNTRTNFAAVCAECNRMKSNTPFAIWARSEDAQTRGVSLAEAKKRVTMFTFNPKSYAPREVKAFKQAVIARLQQTEDDAAIDNRSIESVAWMADELHRRIDWYFNAKQYVNSASIDDAEAETMKTTVSVFQGRVTASARRAAGIEGKIHFIGQQSKTRLDRRHHAVDASVIAMMNTAAAQTLMERESLRESQRLIGLMPGERSWKEYPYEGTSRYESFHLWLDNMDVLLELLNDALDNDRIAVMQSQRYVLGNSIAHDATIHPLEKVPLGSAMSADLIRRASTPALWCALTRLPDYDEKEGLPEDSHREIRVHDTRYSADDEMGFFASQAAQIAVQEGSADIGSAIHHARVYRCWKTNAKGVRKYFYGMIRVFQTDLLRACHDDLFTVPLPPQSISMRYGEPRVVQALQSGNAQYLGSLVVGDEIEMDFSSLDVDGQIGEYLQFFSQFSGGNLAWKHWVVDGFFNQTQLRIRPRYLAAEGLAKAFSDDVVPDGVQKIVTKQGWLPPVNTASKTAVRIVRRNAFGEPRLSSAHHMPCSWQWRHE

SEQ ID NO: 330 - protein, 1151 aa, Bifidobacterium sp.
MRGKRYRIGIDVGLNSVGLAAVEVSDENSPVRLLNAQSVIHDGGVDPQKNKEAITRKNMSGVARRTRRMRRRKRERLHKLDMLLGKFGYPVIEPESLDKPFEEWHVRAELATRYIEDDELRRESISIALRHMARHRGWRNPYRQVDSLISDNPYSKQYGELKEKAKAYNDDATAAEEESTPAQLVVAMLDAGYAEAPRLRWRTGSKKPDAEGYLPVRLMQEDNANELKQIFRVQRVPADEWKPLFRSVFYAVSPKGSAEQRVGQDPLAPEQARALKASLAFQEYRIANVITNLRIKDASAELRKLTVDEKQSIYDQLVSPSSEDITWSDLCDFLGFKRSQLKGVGSLTEDGEERISSRPPRLTSVQRIYESDNKIRKPLVAWWKSASDNEHEAMIRLLSNTVDIDKVREDVAYASAIEFIDGLDDDALTKLDSVDLPSGRAAYSVETLQKLTRQMLTTDDDLHEARKTLFNVTDSWRPPADPIGEPLGNPSVDRVLKNVNRYLMNCQQRWGNPVSVNIEHVRSSFSSVAFARKDKREYEKNNEKRSIFRSSLSEQLRADEQMEKVRESDLRRLEAIQRQNGQCLYCGRTITFRTCEMDHIVPRKGVGSTNTRTNFAAVCAECNRMKSNTPFAIWARSEDAQTRGVSLAEAKKRVTMFTFNPKSYAPREVKAFKQAVIARLQQTEDDAAIDNRSIESVAWMADELHRRIDWYFNAKQYVNSASIDDAEAETMKTTVSVFQGRVTASARRAAGIEGKIHFIGQQSKTRLDRRHHAVDASVIAMMNTAAAQTLMERESLRESQRLIGLMPGERSWKEYPYEGTSRYESFHLWLDNMDVLLELLNDALDNDRIAVMQSQRYVLGNSIAHDATIHPLEKVPLGSAMSADLIRRASTPALWCALTRLPDYDEKEGLPEDSHREIRVHDTRYSADDEMGFFASQAAQIAVQEGSADIGSAIHHARVYRCWKTNAKGVRKYFYGMIRVFQTDLLRACHDDLFTVPLPPQSISMRYGEPRVVQALQSGNAQYLGSLVVGDEIEMDFSSLDVDGQIGEYLQFFSQFSGGNLAWKHWVVDGFFNQTQLRIRPRYLAAEGLAKAFSDDVVPDGVQKIVTKQGWLPPVNTASKTAVRIVRRNAFGEPRLSSAHHMPCSWQWRHE

SEQ ID NO: 331 - protein, 1092 aa, Brevibacillus laterosporus
MAYTMGIDVGIASCGWAIVDLERQRIIDIGVRTFEKAENPKNGEALAVPRREARSSRRRLRRKKHRIERLKYMFVRNGLAVDIQHLEQTLRSQNEIDVWQLRVDGLDRMLTQKEWLRVLIHLAQRRGFQSNRKTDGSSEDGQVLVNVTENDRLMEEKDYRTVAEMMVKDEKFSDHKRNKNGNYHGVVSRASLLVEIHTLFESQRQHHNFLASKDFELEYINIWSSQRPVATKDQIEKMIGTCTFLPKEKRAPKASWHFQYFMLLQTINHIRITNAQGTRPLNKEEIEQVVNMALTKSKVSYHDIRKVLDLSEEYQFVGLDYGKEDEKKKVESKETIIKLDDYHKLNKIFNEVELAKGETWEAVDYDTVAYALTFFKDDEDIRDYLQNKYKDSKNRLVKNVANKEYTNELIEKVSTLSFRKVGHLSLKALRKIIPFLEQGMTYDKACQAAGFNFQGISKKKRSVVLPVIDQISNPVVNRALTQTRKVINALIKKYGSPETIHIETARELSKRFDERKNITKDYKENRDKNERAKKHLSELGIINPTGLDIVKYKLWCEQQGRCMYSNQPISFERLRESGYTEVDHIIPYSRSMNDSYNNRVLVMTRENREKSNQTPYEYMGNDTQRWDEFEQRVTTNPQIKKEKRQNLLLKGFTNRRELEMLERNLNDTRHITKYLSHFISTNLEFSPSDKKKKVVNTSGRITSHLRSRWGLEKNREQNDLHHAMDAVVIAVTSDSFIQQVTNYYKRKERRELNGDDKFPLPWKFFREEVIARLSPNPKEQIEALPNHFYSEDELADLQPIFVSRMPKRSITGEAHQAQFRRVVGKTKEGKNITAKKTALVDISYDKNGDFNMYGRETDPATYEAIKERYLEFGGNAKKAFSTDLHKPKKDGTKGPLIKSVRIMENKTLVHPVNKGKGVVYNSSIVRTDVFQRKEKYYLLPVYVTDVTKGKLPNKVIAAKKGYDDWIEVDDSFTFLYSLYPNDLIFIRQNPKKKISLKKRIESHSISDSKEVQEILTYYKGVDSSTAAIEFITHDGSYYAKGVGVQNLDCFEKYQVDILGNYSKVKGEKRLELETSDNNHKGKDVNSIKSTSR

SEQ ID NO: 332 - protein, 103 aa, Butyrivibrio fibrisolvens
MISVGQSRKDLEDLGYEFKLSFYKEDIIEYEKNGDILVERFLSRTMPQVRNYIETKPIDRPKYDKRNPVGLSKTSSIRKITMDILGNRFYVDKMSFNNVVGTQ

SEQ ID NO: 333 - protein, 177 aa, Butyrivibrio fibrisolvens
MLIAFSQMGYDAYHELTNKYIDFETGEIIDKEGFNELLNNDLVYKNTMYESKWLKIKGNIEKAAEKNKYWYQVNKKCNRGLCNQTVYGTRESDGDVYKISKIDIRTDDGFKKFKNIVDKGNESVFLMYENDPKTFELIMDIYKNYSDSKNPFVQYEKETGDIIRKYSKKITGQRFLN

SEQ ID NO: 334 - protein, 1442 aa, Caenispirillum salinarum
MPVLSPLSPNAAQGRRRWSLALDIGEGSIGWAVAEVDAEGRVLQLTGTGVTLFPSAWSNENGTYVAHGAADRAVRGQQQRHDSRRRRLAGLARLCAPVLERSPEDLKDLTRTPPKADPRAIFFLRADAARRPLDGPELFRVLHHMAAHRGIRLAELQEVDPPPESDADDAAPAATEDEDGTRRAAADERAFRRLMAEHMHRHGTQPTCGEIMAGRLRETPAGAQPVTRARDGLRVGGGVAVPTRALIEQEFDAIRAIQAPRHPDLPWDSLRRLVLDQAPIAVPPATPCLFLEELRRRGETFQGRTITREAIDRGLTVDPLIQALRIRETVGNLRLHERITEPDGRQRYVPRAMPELGLSHGELTAPERDTLVRALMHDPDGLAAKDGRIPYTRLRKLIGYDNSPVCFAQERDTSGGGITVNPTDPLMARWIDGWVDLPLKARSLYVRDVVARGADSAALARLLAEGAHGVPPVAAAAVPAATAAILESDIMQPGRYSVCPWAAEAILDAWANAPTEGFYDVTRGLFGFAPGEIVLEDLRRARGALLAHLPRTMAAARTPNRAAQQRGPLPAYESVIPSQLITSLRRAHKGRAADWSAADPEERNPFLRTWTGNAATDHILNQVRKTANEVITKYGNRRGWDPLPSRITVELAREAKHGVIRRNEIAKENRENEGRRKKESAALDTFCQDNTVSWQAGGLPKERAALRLRLAQRQEFFCPYCAERPKLRATDLFSPAETEIDHVIERRMGGDGPDNLVLAHKDCNNAKGKKTPHEHAGDLLDSPALAALWQGWRKENADRLKGKGHKARTPREDKDFMDRVGWRFEEDARAKAEENQERRGRRMLHDTARATRLARLYLAAAVMPEDPAEIGAPPVETPPSPEDPTGYTAIYRTISRVQPVNGSVTHMLRQRLLQRDKNRDYQTHHAEDACLLLLAGPAVVQAFNTEAAQHGADAPDDRPVDLMPTSDAYHQQRRARALGRVPLATVDAALADIVMPESDRQDPETGRVHWRLTRAGRGLKRRIDDLTRNCVILSRPRRPSETGTPGALHNATHYGRREITVDGRTDTVVTQRMNARDLVALLDNAKIVPAARLDAAAPGDTILKEICTEIADRHDRVVDPEGTHARRWISARLAALVPAHAEAVARDIAELADLDALADADRTPEQEARRSALRQSPYLGRAISAKKADGRARAREQEILTRALLDPHWGPRGLRHLIMREARAPSLVRIRANKTDAFGRPVPDAAVWVKTDGNAVSQLWRLTSVVTDDGRRIPLPKPIEKRIEISNLEYARLNGLDEGAGVTGNNAPPRPLRQDIDRLTPLWRDHGTAPGGYLGTAVGELEDKARSALRGKAMRQTLTDAGITAEAGWRLDSEGAVCDLEVAKGDTVKKDGKTYKVGVITQGIFGMPVDAAGSAPRTPEDCEKFEEQYGIKPWKAKGIPLA

SEQ ID NO: 335 - protein, 984 aa, Campylobacter coli
MARILAFDIGISSIGWAFSENDELKDCGVRIFTKAENPKTGESLALPRRLARSARKCLARRKARLNHLKHLIANEFKLNYEDYQSFDESLAKAYKGSLISPYELRFRALNELLSKQDFARVILHIAKRRGYDDIKNNGDEEKSEILKAIKQNEEKLVNYQSVGEYLYKEYFQKFKENSKEFINVRNKKESYERCIAQSFLKDELKLIFQKQREFGFSFSKKFEEEVLSVAFYKRALKDFSHLVGNCSFFTDEKRAPKNSPLAFMFVALTRIINLLNNLKNTEGILYTKDDLNALLNEVLKNGTLTYKQTKKLLGLSDDYEFKGEKGTYFIEFKKYKEFIKALGEHNLSQDDLNEIAKDITLIKDEIKLKKALAKYDLNQNQIDSLSKLEFKDHLNISFKALKLITPLMLEGKKYDEACNELNLKVAINEDKKDFLPAFNETYYKDEVTNPVVLRAIKEYRKVLNALLKKYGKVHKINIELAREVGKNHSQRAKIEKEQNENYKAKKDAELECEKLGLKINSKNILKLRLFKEQKEFCAYSGEKIKISDLQDEKMLEIDHIYPYSRSFDDSYMNKVLVFTKQNQEKLNQTPFEAFGNDSAKWQKIEVLAKNLPTKKQKRILDKNYKDKEQKNFKDRNLNDTRYIARLVLNYTKDYLDFLPLSDDENTKLNDTQKGSKVHVEAKSGMLTSALRHTWGFSAKDRNNHLHHAIDAVIIAYANNSIVKAFSDFKKEQESNSAELYAKKISELDYKNKRKFFEPFSGFRQKVLDKIDEIFVSKPERKKPSGALHEETFRKEEEFYQSYGGKEGVLKALELGKIRKVNGKIVKNGDMFRVDIFKHKKTNKFYAVPIYTMDFALKVLPNKAVARSKKGEIKDWILMDENYEFCFSLYKDSLILIQTKDMQEPEFVYYNAFTSSTVSLIVSKHDNKFETLSKNQKILFKNANEKEVIAKSIGIQNLKVFEKYIVSALGEVTKAEFRQREDFKK

SEQ ID NO: 336 - protein, 984 aa, Campylobacter coli
MARILAFDIGISSIGWAFSENDELKDCGVRIFTKAENPKTGESLALPRRLARSARKRLARRKARLNHLKHLIANEFKLNYEDYQSFDESLAKAYKGSLISPYELRFRALNELLSKQDFARVILHIAKRRGYDDIKNNGDEEKGKILKAIKQNEEKLVNYQSVGEYLYKEYFQKFKENSKEFINVRNKKESYERCITQSFLKYELKLIFQKQREFGFSFSKKFEEEVLSVAFYKRALKDFSHLVGNCSFFSDEKRAPKNSPLAFMFVALTRIINLLNNLKNTEGILYTKDDLNALLNEVLKNGTLTYKQTKKLLGLSDDYEFKGEKGTYFIEFKKYKEFIKALGEHNLSQDDLNEIAKDITLIKDEIKLKKALAKYDLNQNQIDSLSKLEFKDHLNISFKALKLITPLMLEGKKYDEACNELNLKVAINEDKKDFLPAFNETYYKDEVTNPVVLRAIKEYRKVLNALLKKYGKVHKINIELAREVGKNYSQRAKIEKEQNENYKAKKDAELECEKLGLKINSKNILKLRLFKEQKEFCAYSGEKIKISDLQDEKMLEIDHIYPYSRSFDDSYMNKVLVFTKQNQEKLNQTPFEAFGNDSAKWQKIEVLAKNLPTKKQKRILDKNYKDKEQKNFKDRNLNDTRYIARLVLNYTKDYLDFLPLSDDENTKLNDTQKGSKVHVEAKSGMLTSALRHTWGFSAKDRNNHLHHAIDAVIIAYANNSIVKAFSDFKKEQESNSAELYAKKISELDYKNKRKFFEPFSGFRQKVLDKIDEIFVSKPERKKPSGALHEETFRKEEEFYQSYGGKEGVLKALELGKIRKVNGKIVKNGDMFRVDIFKHKKTNKFYAVPIYTMDFALKVLPNKAVARSKKGEIKDWILMDENYEFCFSLYKDSLILIQTKDMQEPEFVYYNAFTSSTVSLIVSKHDNKFETLSKNQKILFKNANEKEVIAKSIGIQNLKVFEKYIVSALGEVTKAEFRQREDFKK

SEQ ID NO: 337 - protein, 984 aa, Campylobacter coli
MARILAFDIGISSIGWAFSENDELKDCGVRIFTKAENPKTGESLALPRRLARSARKRLARRKARLNHLKHLIANEFKLNYEDYQSFDESLAKAYKGSLISPYELRFRALNELLSKQDFARVILHIAKRRGYDDIKNNGDEEKSEILKAIKQNEEKLVNYQSVGEYLYKEYFQKFKENSKEFINVRNKKESYERCIAQSFLKDELKLIFQKQREFGFSFSKKFEEEVLSVAFYKRALKDFSHLVGNCSFFTDEKRAPKNSPLAFMFVALTRIINLLNNLKNTEGILYTKDDLNTLLNEVLKNGTLTYKQTKKLLGLSDDYEFKGEKGTYFIEFKKYKEFIKALGEHNLSQDNLNEIAKDITLIKDEIKLKKALAKYDLNQNQIDSLSKLEFKDHLNISFKALKLITPLMLEGKKYDEAYNELNLKVAINEDKKDFLPAFNETYYKDEVTNPVVLRAIKEYRKVLNALLKKYGKVHKINIELAREVGKNHSQRAKIEKEQNENYKAKKDAELECEKLGLKINSKNILKLRLFKEQKEFCAYSGEKIKISDLQDEKMLEIDHIYPYSRSFDDSYMNKVLVFTKQNQEKLNQTPFEAFGNDSAKWQKIEVLAKNLPTKKQKRILDKNYKDKEQKDFKDRNLNDTRYIARLVLNYTKDYLDFLPLSDDENTKLNDTQKGSKVHVEAKSGMLTSALRHTWGFSAKDRNNHLHHAIDAVIIAYANNSIVKAFSDFKKEQESNSAELYAKKISELDYKNKRKFFEPFSGFRQKVLDKIDEIFVSKPERKKPSGALHEETFRKEEEFYQSYGGKEGVLKALELGKIRKVNGKIVKNGDMFRVDIFKHKKTNKFYAVPIYTMDFALKVLPNKAVARSKKGEIKDWILMDENYEFCFSLYKDSLILIQTKDMQEPELVYFNAFTSSTVSLIVSKHDNKFETLSKNQKILFKNANEKEVIAKSIGIQNLKVFEKYIVSALGEVTKAEFRQREDFKK

SEQ ID NO: 338 - protein, 984 aa, Campylobacter coli
MARILAFDIGISSIGWAFSENDELKDCGVRIFTKAENPKTGESLALPRRLARSARKRLARRKARLNHLKHLIANEFKLNYEDYQSFDESLAKAYKGSLISPYELRFRALNELLSKQDFARVILHIAKRRGYDDIKNNGDEEKSEILKAIKQNEEKLVNYQSVGEYLYKEYFQKFKENSKEFINVRNKKESYERCIAQSFLKDELKLIFQKQREFGFSFSKKFEEEVLSVAFYKRALKDFSHLVGNCSFFTDEKRAPKNSPLAFMFVALTRIINLLNNLKNTEGILYTKDDLNALLNEVLKNGTLTYKQTKKLLGLSDDYEFKGEKGTYFIEFKKYKEFIKALGEHNLSQDDLNEIAKDITLIKDEIKLKKALAKYDLNQNQIDSLSKLEFKDHLNISFKALKLITPLMLEGKKYDEACNELNLKVAINEDKKDFLPAFNETYYKDEVTNPVVLRAIKEYRKVLNALLKKYGKVHKINIELAREVGKNYSQRAKIEKEQNENYKAKKDAELECEKLGLKINSKNILKLRLFKEQKEFCAYSGEKIKISDLQDEKMLEIDHIYPYSRSFDDSYMNKVLVFTKQNQEKLNQTPFEAFGNDSAKWQKIEVLAKNLPTKKQKRILDKNYKDKEQKNFKDRNLNDTRYIARLVLNYTKDYLDFLPLSDDENTKLNDTQKGSKVHVEAKSGMLTSALRHTWGFSAKDRNNHLHHAIDAVIIAYANNSIVKAFSDFKKEQESNSAELYAKKISELDYKNKRKFFEPFSGFRQKVLDKIDEIFVSKPERKKPSGALHEETFRKEEEFYQSYGGKEGVLKALELGKIRKVNGKIVKNGDMFRVDIFKHKKTNKFYAVPIYTMDFALKVLPNKAVARSKKGEIKDWILMDENYEFCFSLYKDSLILIQTKDMQEPEFVYYNAFTSSTVSLIVSKHDNKFETLSKNQKILFKNANEKEVIAKSIGIQNLKVFEKYIVSALGEVTKAEFRQREDFKK

SEQ ID NO: 339 - protein, 987 aa, Campylobacter coli
MARILAFDIGISSIGWAFSENDELKDCGVRIFTKAENPKTGESLALPRRLARSARKRLARRKARLNHLKHLIANEFKLNYEDYQSFDESLAKAYKGSLISPYELRFRALNELLSKQDFARVILHIAKRRGYDDIKNNGDEEKSEILKAIKQNEEKLVNYQSVGEYLYKEYFQKFKENSKEFINVRNKKESYERCIAQSFLKDELKLIFQKQREFGFSFSKKFEEEVLSVAFYKRALKDFSHLVGNCSFFTDEKRAPKNSPLAFMFVALTRIINLLNNLKNTEGILYTKDDLNTLLNEVLKNGTLTYKQTKKLLGLSDDYEFKGEKGTYFIEFKKYKEFIKALGEHNLSQDNLNEIAKDITLIKDEIKLKKALAKYDLNQNQIDSLSKLEFKDHLNISFKALKLITPLMLEGKKYDEAYNELNLKVAINEDKKDFLPAFNETYYKDEVTNPVVLRAIKEYRKVLNALLKKYGKVHKINIELAREVGKNHSQRAKIEKEQNENYKAKKDAELECEKLGLKINSKNILKLRLFKEQKEFCAYSGEKIKISDLQDEKMLEIDHIYPYSRSFDDSYMNKVLVFTKQNQEKLNQTPFEAFGNDSAKWQKIEVLAKNLPTKKQKRILDKNYKDKEQKDFKDRNLNDTRYIARLVLNYTKDYLDFLPLSDDENTKLNDTQKGSKVHVEAKSGMLTSALRHTWGFSAKDRNNHLHHAIDAVIIAYANNSIVKAFSDFKKEQESNSAELYAKKISELDYKNKRKFFEPFSGFRQKVLDKIDEIFVSKPERKKPSGALHEETFRKEEEFYQSYGGKEGVLKALELGKIRKVNGKIVKNGDMFRVDIFKHKKTNKFYAVPIYTMDFALKVLPNKAVARSKKGEIKDWILMDENYEFCFSLYKDSLILIQTKDMQEPELVYFNAFTSSTVSLIVSKHDNKFETLSKNQKILFKNANEKEVIAKSIGIQNLKVFEKYIVSALGEVTKAEFRQREDFKNELR

SEQ ID NO: 340 - protein, 984 aa, Campylobacter coli
MARILAFDIGISSIGWAFSENDELKDCGVRIFTKAENPKTGESLALPRRLARSARKRLARRKARLNHLKHLIANEFKLNYEDYQSFDESLAKAYKGSLISPYELRFRALNELLSKQDFARVILHIAKRRGYDDIKNNGDEEKSEILKAIKQNEEKLVNYQSVGEYLYKEYFQKFKENSKEFINVRNKKESYERCIAQSFLKDELKLIFQKQREFGFSFSKKFEEEVLSVAFYKRALKDFSHLVGNCSFFTDEKRAPKNSPLAFMFVALTRIINLLNNLKNTEGILYTKDDLNTLLNEVLKNGTLTYKQTKKLLGLSDDYEFKGEKGTYFIEFKKYKEFIKALGEHNLSQDNLNEIAKDITLIKDEIKLKKALAKYDLNQNQIDSLSKLEFKDHLNISFKALKLITPLMLEGKKYDEAYNELNLKVAINEDKKDFLPAFNETYYKDEVTNPVVLRAIKEYRKVLNALLKKYGKVHKINIELAREVGKNHSQRAKIEKEQNENYKAKKDAELECEKLGLKINSKNILKLRLFKEQKEFCAYSGEKIKISDLQDEKMLEIDHIYPYSRSFDDSYMNKVLVFTKQNQEKLNQTPFEAFGNDSAKWQKIEVLAKNLPTKKQKRILDKNYKDKEQKDFKDRNLNDTRYIARLVLNYTKDYLDFLPLSNDENTKLNDTQKGSKVHVEAKSGMLTSALRHTWGFSAKDRNNHLHHAIDAVIIAYANNSIVKAFSDFKKEQESNSAELYAKKISELDYKNKRKFFEPFSGFRQKVLDKIDEIFVSKPERKKPSGALHEETFRKEEEFYQSYGGKEGVLKALELGKIRKVNGKIVKNGDMFRVDIFKHKKTNKFYAVPIYTMDFALKVLPNKAVARSKKGEIKDWILMDENYEFCFSLYKDSLILIQTKDMQEPELVYFNAFTSSTVSLIVSKHDNKFETLSKNQKILFKNANEKEVIAKSIGIQNLKVFEKYIVSALGEVTKAEFRQREDFKK

SEQ ID NO: 341 - protein, 987 aa, Campylobacter coli
MARILAFDIGISSIGWAFSENDELKDCGVRIFTKAENPKTGESLALPRRLARSARKRLARRKARLNHLKHLIANEFKLNYEDYQSFDESLAKAYKGSLISPYELRFRALNELLSKQDFARVILHIAKRRGYDDIKNSDDKEKGAILKAIKQNEEKLANYQSVGEYLYKEYFQKFKENSKEFTNVRNKKESYERCIAQSFLKDELKLIFKKQREFGFSFSKKFEEEVLSVAFYKRALKDFSHLVGNCSFFTDEKRAPKNSPLAFMFVALTRIINLLNNLKNTEGILYTKDDLNALLNEVLKNGTLTYKQTKKLLGLSDDYEFKGEKGTYFIEFKKYKEFIKALGDHSLSQDDLNEIAKDITLIKDEIKLKKALAKYDLNQNQIDSLSKLEFKDHLNISFKALKLITPLMLEGKKYDEACNELNLKVAINEDKKDFLPAFNETYYKDEVTNPVVLRAIKEYRKVLNALLKKYGKVHKINIELAREVGKNYSQRAKIEKEQNENYKAKKDAELECEKLGLKINSKNILKLRLFKEQKEFCAYSGEKIKISDLQDEKMLEIDHIYPYSRSFDDSYMNKVLVFTKQNQEKLNKTPFEAFGNDSTKWQKIEVLAKNLPEKKQKRILDKNYKDKEQKDFKDRNLNDTRYIARLVLNYTKDYLDFLPLSDDENTKLNDTQKGSKVHVEAKSGMLTSALRHTWGFSTKDRNNHLHHAIDAVIIAYANNSIVKAFSDFKKEQESNSAELYAKKISELDYKNKRKFFEPFSGFRQKVLDKIDEIFVSKPERKKPSGALHEETFRKEEEFYQSYGGKEGVLKALELGKIRKVNGKIVKNGDMFRVDIFKHKKTNKFYAVPIYTMDFALKVLPNKAVARSKKGEIKDWILMDENYEFCFSLYKDSLILIQTKDMQEPEFVYYNAFTSSTVSLIVSKHDNKFETLSKNQKILFKNANEKEVIAKSIGIQNLKVFEKYIVSALGEVTKAEFRQREDFKNELR

SEQ ID NO: 342 - protein, 984 aa, Campylobacter coli
MARILAFDIGISSIGWAFSENDELKDCGVRIFTKAENPKTGESLALPRRLARSARKRLARRKARLNHLKHLIANEFKLNYEDYQSFDESLAKAYKGSLISPYELRFRALNELLSKQDFARVILHIAKRRGYDDIKNSDDKEKGAILKAIKQNEEKLTNYQSVGEYLYKEYFQKFKENSKEFTNVRNKKESYERCIAQSFLKDELKLIFKKQREFGFSFSKKFEEEVLSVAFYKRALKDFSHLVGNCSFFTDEKRAPKNSPLAFMFVALTRIINLLNNLKNTEGILYTKDDLNALLNEVLKNGTLTYKQTKKLLGLSDDYEFKGEKGTYFIEFKKYKEFIKALGDHSLSQDDLNEIAKDITLIKDEIKLKKALAKYDLNQNQIDSLSKLEFKDHLNISFKALKLITPLMLEGKKYDEACNELNLKVAINEDKKDFLPAFNETYYKDEVTNPVVLRAIKEYRKVLNALLKKYGKVHKINIELAREVGKNYSQRAKIEKEQNENYKAKKDAELECEKLGLKINSKNILKLRLFKEQKEFCAYSGEKIKISDLQDEKMLEIDHIYPYSRSFDDSYMNKVLVFTKQNQEKLNQTPFEAFGNDSAKWQKIEVLAKNLPTKKQKRILDKNYKDKEQKDFKDRNLNDTRYIARLVLNYTKDYLDFLPLSDDENTKLNDTQKGSKVHVEAKSGMLTSALRHTWGFSAKDRNNHLHHAIDAVIIAYANNSIVKAFSDFKKEQESNSAELYAKKISELDYKNKRKFFEPFSGFRQKVLDKIDEIFVSKPERKKPSGALHEETFRKEEEFYQSYGGKEGVLKALELGKIRKVNGKIVKNGDMFRVDIFKHKKTNKFYAVPIYTMDFALKVLPNKAVARSKKGEIKDWILMDENYEFCFSLYKDSLILIQTKDMQEPEFVYYNAFTSSTVSLIVSKHDNKFETLSKNQKILFKNANEKEVIAKSIGIQNLKVFEKYIVSALGEVTKAEFRQREDFKK

SEQ ID NO: 343 - protein, 965 aa, Campylobacter coli
MKIIGFNLGIANIGWALRENDEIIDCGVRVFDIPENPKNGNSLALERRENKARMKIVKRKKARMLATKTFLKKELNVDLSKLFLIGSTQSIYELRTKALSSLISKEELSAIILHIAKHRGYDDSALKNENGTIIEALNKNKEAMLKFKSVGEYFYKNFVQNKEVKKIRNTTEDYSNSVPRSLLKQELDLILDKQKELGLIKNADFKAKLFEIIFFKRPLKDFSNKIGNCIFFENEKRAAKNTISACEFVALGKVVNLLKSIEKDIGIVYEKDSINEIMSIILDKTSISYKKIRDILNLPQDINFKGLDYSKNNVENSKLVDLKKLNEFKKALGDGFTNLDKDILDSIATDITLTKDTATLKEKLKNYNVLNAEQIEKLSELVFNDHINLSLKALKQIIPLMYEGKRYDEACELCNFTIAKNQEKNEYLPLFEKTRFAKDISSPVVIRAICEFRKLLNDIIRRYGSVHKIHLELTRDFGISFNDRKKIIKEIEQNEQSRIKALETIKELKLEETSKNIQIVRLFEDQKGICPYSGLKMDLKCLDELVIDYIRPYNRSLDDSYSNKVLTFKKLNDLKQGKTPFEAFGEDEKLWAEINERIKEYNGKKRFKIFDKFFKDKKPFDFTEQTLQDTRWLTKLVASYLNEYLSFLPISEDENTALGYGEKGSKQHVILSSGMITQMLRNFWYLGFKNHKDYKNNAMDAIIVAFTTNSIIFTFNNFKKELDLAKAEFYANKISESDYLLKRKFLPPFSGFKEQALEKVKNIFVSHSLKIKNKGTLHELTPLKIKELKNTYGDLDLAVKLGKIRKYNDKYYANAKGSLVRTDLFADKENKFHAVSIYKADFSTKKLPNKTPATTSNGETKEGIEMNENYNFCMSLYKNTPISVKIKGMKEPIICYYHGFNTSGSKITYKKHDNNYHNLSEDEMVVFRKNDKESIVVGKILEIKKYSISPSGELSLIENEERKWF

SEQ ID NO: 344 - protein, 965 aa, Campylobacter coli
MKIIGFNLGIANIGWALRENDEIIDCGVRVFDIPENPKNGNSLALERRENKARMKIVKRKKARMLATKTFLKKELNVDLSKLFLIGSTQSIYELRTKALSSLISKEELSAIILHIAKHRGYDDSALKNENGTIIEALNKNKEAMLKFKSVGEYFYKNFVQNKEVKKIRNTTEDYSNSVPRSLLKQELDLILDKQKELGLIKNADFKAKLFEIIFFKRPLKDFSNKIGNCIFFENEKRAAKNTISACEFVALGKVVNLLKSIEKDIGIVYEKDSINEIMSIILDKTSISYKKIRDILNLPQDINFKGLDYSKNNAENSKLVDLKKLNEFKKALGDGFANLDKDILDSIATDITLTKDTATLKEKLKNYNVLNAEQIEKLSELVFNDHINLSLKALKQIIPLMYEGKRYDEACELCNFTIAKNQEKNEYLPLFEKTRFAKDISSPVVIRAICEFRKLLNDIIRRYGSVHKIHLELTRDFGISFNDRKKIIKEIEQNEQSRIKALETIKELKLEETSKNIQIVRLFEDQKGICPYSGLKMDLKCLDELVIDYIRPYNRSLDDSYSNKVLTFKKLNDLKQGKTPFEAFGEDEKLWAEINERIKEYNGKKRFKIFDKFFKDKKPFDFTEQTLQDTRWLTKLVASYLNEYLSFLPISEDENTALGYGEKGSKQHVVLSSGMITQMLRNFWYLGFKNHKNYKNNAMDAIIVAFTTNSIIFAFNNFKKELDLAKAEFYANKISESDYLLKRKFLPPFSGFKEQALEKVKNIFVSHSLKIKNKGTLHELTPLKIKELKNTYGDLDLAVKLGKIRKYNDKYYANTKGSLVRTDLFVDKENKFHAVSIYKADFSTKKLPNKTPATTSNGETKEGIEMNENYNFCMSLYKNTPVSVKIKGMKEPIICYYHGFNTSGSKITYKKHDNNYHNLSEDEMVVFRKNDKESIVVGKILEIKKYSISPSGELSLIENEKRKWF

SEQ ID NO: 345 - protein, 965 aa, Campylobacter coli
MKIIGFNLGIANIGWALRENDEIIDCGVRVFDIPENPKNGNSLALERRENKARMKIVKRKKARMLATKTFLKKELNVDLSKLFLIGSTQSIYELRTKALSSLISKEELSAIILHIAKHRGYDDSALKNENGTIIEALNKNKEAMLKFKSVGEYFYKNFVQNKEVKKIRNTTEDYSNSVPRSLLKQELDLILDKQKELGLIKNADFKEKLFEIIFFKRPLKDFSNKIGNCIFFENEKRAAKNTISACEFVALGKVVNLLKSIEKDIGIVYEKDSINEIMSIILDKTSISYKKIRDILNLPQDINFKGLDYSKNNAENSKLVDLKKLNEFKKALGDGFANLDKDILDSIATDITLTKDTATLKEKLKNYNVLNAEQIEKLSELVFNDHINLSLKALKQIIPLMYEGKRYDEACELCNFTIAKNQEKNEYLPLFEKTRFAKDISSPVVIRAICEFRKLLNDIIRRYGSVHKIHLELTRDFGISFNDRKKIIKEIEQNEQSRIKALETIKELKLEETSKNIQIVRLFEDQKGICPYSGLKMDLKCLDELVIDYIRPYNRSLDDSYSNKILTFKKLNDLKQGKTPFEAFGEDEKLWAEINERIKEYNGKKRFKIFDKFFKDKKPFDFTEQTLQDTRWLTKLVASYLNEYLLFLPINEDENTALGYGEKGSKQHVVLSSGMITQMLRNFWYLGFKNHKDYKNNAMDAIIVAFTTNSIIFAFNNFKKELDLAKAEFYANKISESDYLLKRKFLPPFSGFKEQALEKVKNIFVSHSLKIKNKGTLHELTPLKIKELKNTYGDLDLAVKLGKIRKYNDKYYANAKGSLVRTDLFADKENKFHAVSIYKADFSTKKLPNKTPATTSNGETKEGIEMNENYNFCMSLYKNTPISVKIKGMKEPIICYYHGFNTSGSKITYKKHDNNYHNLSEDEMVVFRKNDKESIVVGKILEIKKYSISPSGELSLIENEERKWF

SEQ ID NO: 346 - protein, 933 aa, Campylobacter coli
MKIIGFNLGIANIGWALRENDEIIDCGVRVFDIPENPKNGNSLALERRENKARMKIVKRKKARMLATKTFLKKELNVDLSKLFLIGSTQSIYELRTKALSSLISKEELSVIILHIAKHRGYDDSALKNENGTIIEALNKNKETMLKFKSVGEYFYKNFVQNKEVKKIRNTTEDYSNSVPRSLLKQELDLILDRQKELGLIKNADFKAKLFEIIFFKRPLKDFSNKIGNCIFFENEKRAAKNTISACEFVALGKVVNLLKSIEKDIGIVYEKDSINEIMSIILDKTSISYKKIRDILNLPQDINFKGLDYSKNNVENSKLVDLKKLNEFKKALGDGFTNLDKDILDSIATDITLTKDTATLKEKLKNYNVLNAEQIEKLSELVFNDHINLSLKALKQIIPLMYEGKRYDEACELCNFTIAKNQEKNEYLPLFEKTRFAKDISSPVVIRAICEFRKLLNDIIRRYGSVHKIHLELTRDFGISFNDRKKIIKEIEQNEQSRIKALETIKELKLEETSKNIQIVRLFEDQKGICPYSGLKMDLKCLDELVIDYIRPYNRSLDDSYSNKVLTFKKLNDLKQGKTPFEAFGEDEKLWAEINERIKEYNGKKRFKIFDKFFKDKKPFDFTEQTLQDTRWLTKLVASYLNEHLSFLPISEDENTALGYGEKGSKQHVILSSGMITQMLRNFWYLGFKNHKDYKNNAMDAIIVAFTTNSIIFTFNNFKKELDLAKAEFYANKISESDYLLKRKFLPPFSGFKEQALEKVKNIFVSHSLKIKNKGTLHELTPLKIKELKNTYGDLDLAVKLGKIRKYNDKYYANANGSLVRSDLFIDKKNKFHAVPIYKADFSTKKLPNKTPATTSNGETKEGIEMNENYNFCMSLYKNTPISVKIKGMKESIICYYHGFNTSGSKITYKKHDNNYHNLSEDEMVVFRKNDKE

SEQ ID NO: 347 - protein, 666 aa, Campylobacter jejuni
KGEKGTYFIEFKKYKEFIKALDEHSLSQDDLNEIAKDITLIKDEIKLKKALAKYDLKENQIDSLSKLEFKDHLNISFKALKLITPLMLEGKKYDEACNELNLKVAINEDKKDFLPAFNETYYKDEVTNPVVLRAIKEYRKILNALLKKYGKVHKINIELAREVGKNHSQRAKIEKEQNENYKAKKDAELECEKLGLKINSKNILKLRLFKEQKEFCVYSGEKIKLSDLQDEKMLEIDHIYPYSRSFDDSYMNKVLVFAKQNQEKLNKTPFEAFGNDSTKWQKIEVLTKNLPTKKQKRILDKNYKDKEQKDFKDRNLNDTRYIARLVLNYTKDYLDFLPLSDDENTKLNDTQKGSKVHVEAKSGMLTSALRHTWGFSTKDRNNHLHHAIDAAIIAYANNSIVKAFSDFKKEQESNSAELYAKKISELDYKNKRKFFEPFSGFRQKVLDKIDEIFVSKPERKKPSGALHEETFRKEEEFYQSYGGKEGVLKALELGKIRKVNGKIVKNGDMFRVDIFKHKKTNKFYAVPIYTMDFALKVLPNKAVARSKKGEIKDWILMDEDYEFCFSLYKDSLILIQTKDMQEPELVYFNAFTSSTVSLIVSKHDNKFETLSKNQKILFKNANEKEVIAKSIGIQNLKVFEKYIVSALGEVTKAEFRQREDFKNELR

SEQ ID NO: 348 - protein, 190 aa, Campylobacter jejuni
MAFDIGISSIGWAFSENDELKDCGVRIFTKVENPKTGESLALPRRLARSARKRLARRKARLNHLKHLIANEFKLNYEDYQSFDESLAKAYKGSLISPYELRFRALNELLSKQDFARVILHIAKRRGYDDIKNSDDKEKGAILKAIKQNEEKLANYQSVGEYLYKEYFQKFKENSKEFTNVRNKKKVMNAA

SEQ ID NO: 349 - protein, 985 aa, Campylobacter jejuni
MAKILAFDIGISSIGWAFVENDELKDCGVRIFTKAENPKTGESLALPRRLARSARKRLARRKARLNHLKHLIANEFKLNYEDYQSFDESLAKAYKGTLISPYELRFKALNELLSKQDLARVILHIAKRRGYDNIKNSDDKEKGAILKAVKENEEKLANYKSVGEYLYKEYFQKFKENSKEFINVRNKKESYERCIAQSFLKDELKLIFQKQREFGFNFSKKFEEEVLSVAFYKRALKDFSHLVGNCSFFVDEKRAPKNSPLAFEFVALTRIVNLLNNLNKNNSYIKDDLNALLSEVLKNGTLTYKQTKKILGLSDDYEFKGQKGNYFIEFKKYKEFIKALCEHNLNQDDLNEIAKDITLVKDETKLKKALAKYDLNQNQIENLSKIEFKDHLNISFKALKLIVPLMREGKKYDEVCNELNLKTAINEDKKEFLPAFNETYYKDEVNNPVVLRAIKEYRKVLNSLLKKYGKVHKINIELAREVGKNHRERSKIEKEQNENFKAKKDAELECEKLGLKINSKNILKLRLFKEQKEFCVYSGEKIKISDLQDEKMLEIDHIYPYSRSFDDSYMNKVLVFTKQNQEKLNKTPFEAFGKDDVKWQKIETLAKNLPAKKQKRILDKNYKDKEQKDFKDRNLNDTRYIARLVLNYTKDYLEFLPLSDDENIKLNDTQKGSKVHVEAKSGMLTSVLRHTWGFSTKDRNNHLHHAIDAVIIAYANASVVKAFSDFKKEQENYTAELYAKKINELDFKNKRKFFEPFSNFRQKVLEKIDEIFVSKPERKKPSGALHEETFYKEEEFYKEYGGKEGVLKALELGKIRKVNGKIVSNANMFRVDIFKYKKTNKFYAVPIYTMDFALGILPNKAVVGGKDKQGIIKDWLLMDENYEFCFSLYKDSLILLQTKDMQEPELVYFKSFKSSTAGLVVSKHDNKFENLNENQKKLFKSANEKKVVAEGIGIQNLKVFEKYIVSALGEITKAEIKERENFKKK

SEQ ID NO: 350 - protein, 987 aa, Campylobacter jejuni
MARILAFDIGISSIGWAFSENDELKDCGVRIFTKAENPKTGESLALPRCLARSARKRLARRKARLNHLKHLIANEFKLNYEDYQSFDESLAKAYKGSLISPYELRFRALNELLSKQDFARVILHIAKRRGYDDIKNNGDEEKGEILKAIKQNEEKLVSYQSVGEYLYKEYFQKFKENSKEFINVRNKKESYERCIAQSFLKDELKLIFQKQRKFGFSFSKKFEEEVLSVAFYKRALKDFSHLVGNCSFFTDEKRAPKNSPLAFMFVALTRIINLLNNLKNTEGILYTKDDLNTLLNEVLKNGTLTYKQTKKLLGLSNDYEFKGEKGTYFIEFQKYKEFVKALGEHNLSQDDLNEIAKDITLIKDEIKLKKALAKYDLNQNQIDSLSKLEFKDHLNISFKALKLITPLMLEGKKYDEACNELNLKVAINEDKKDFLPAFNETYYKDEVTNPVVLRAIKEYRKVLNALLKKYGKVHKINIELAREVGKNHSQRAKIEKEQNENYKAKKDAELECEKLGLKINSKNILKLRLFKEQKEFCVYSGEKIKISDLQDEKMLEIDHIYPYSRSFDDSYMNKVLVFTKQNQEKLNKTPFETFGNDRVKWQKIEVLAKNLPTKKQKRILDKNYKDKEQKDFKDRNLNDTRYIARLVLNYTKDYLDFLPLSDDENTKLNDTQKGSKVHVEAKSGMLTSTLRHTWGFSTKDRNNHLHHAIDAAIIAYANNSIVKAFSDFKKEQESNTAELYAKKISELDYKNKRKFFEPFSGFRQKLLDKIDEIFVSKPERKKPSGALHEETFRKEEEFYQSYGGKEGVLKALELGKIRKVNGKIVSNGDMFRVDIFKHKKTNKFYAVPIYTMDFALKVLPNKAVVQGKDKKSGLIKDWILMDENYEFCFSLYKDSLILIQTKDMQEPELVYYERLDSSNASLTVSKHDNKFETLSKNQKILFKNANEKEVIAKSIGIQNLKVFEKYIVSALGEVTKAEFRQREDFKK

SEQ ID NO: 351 - protein, 987 aa, Campylobacter jejuni
MARILAFDIGISSIGWAFSENDELKDCGVRIFTKAENPKTGESLALPRRLARSARKRLARRKARLNHLKHLIANEFKLNYEDYQSFDEGLAKAYKGSLISPYELRFRALNELLSKQDFARVILHIAKRRGYDDIKNNGDEEKSEILKAIKQNEEKLVNYQSVGEYLYKEYFQKFKENSKEFINVRNKKESYERCIAQSFLKDELKLIFQKQREFGFSFSKKFEEEVLSVAFYKRALKDFSHLVGNCSFFTDEKRAPKNSPLAFMFVALTRIINLLNNLKNTEGILYTKDDLNTLLNEVLKNGTLTYKQTKKLLGLSDDYEFKGEKGTYFIEFKKYKEFIKALGEHNLSQDNLNEIAKDITLIKDEIKLKKALAKYDLNQNQIDSLSKLEFKDHLNISFKALKLITPLMLEGKKYDEAYNELNLKVAINEDKKDFLPAFNETYYKDEVTNPVVLRAIKEYRKVLNALLKKYGKVHKINIELAREVGKNHSQRAKIEKEQNENYKAKKDAELECEKLGLKINSKNILKLRLFKEQKEFCAYSGEKIKISDLQDEKMLEIDHIYPYSRSFDDSYMNKVLVFTKQNQEKLNQTPFEAFGNDSAKWQKIEVLAKNLPTKKQKRILDKNYKDKEQKDFKDRNLNDTRYIARLVLNYTKDYLDFLPLSDDENTKLNDTQKGSKVHVEAKSGMLTSALRHTWGFSAKDRNNHLHHAIDAVIIAYANNSIVKAFSDFKKEQESNSAELYAKKISELDYKNKRKFFEPFSGFRQKVLDKIDEIFVSKPERKKPSGALHEETFRKEEEFYQSYGGKEGVLKALELGKIRKVNGKIVKNGDMFRVDIFKHKKTNKFYAVPIYTMDFALKVLPNKAVVQGKDKKSGLIKDWILMDENYEFCFSLYKDSLILIQTKDMQEPELVYFNAFTSSTVSLIVSKHDNKFETLSKNQKILFKNANEKEVIAKSIGIQNLKVFEKYIVSALGEVTKAEFRQREDFKK

SEQ ID NO: 352 - protein, 961 aa, Campylobacter jejuni
MARILAFDIGISSIGWAFSENDELKDCGVRIFTKAENPKTGESLALPRRLARSARKRLARRKARLNHLKHLIANEFKLNYEDYQSFDESLAKAYKGSLISPYELRFRALNELLSKQDFARVILHIAKRRGYDDIKNNGDEEKGKILKAIKQNEEKLVNYQSVGEYLYKEYFQKFKENSKEFINVRNKKESYERCITQSFLKYELKLIFQKQREFGFSFSKKFEEEVLSVAFYKRALKDFSHLVGNCSFFSDEKRAPKNSPLAFMFVALTRIINLLNNLKNTEGILYTKDDLNALLNEVLKNGTLTYKQTKKLLGLSDDYEFKGEKGTYFIEFKKYKEFIKALGEHNLSQDDLNEIAKDITLIKDEIKLKKALAKYDLNQNQIDSLSKLEFKDHLNIGFKALKLITPLMLEGKKYDEACNELNLKVAINEDKKDFLPAFNETYYKDEVTNPVVLRAIKEYRKVLNALLKKYGKVHKINIELAREVGKNHSQRAKIEKEQNENYKAKKDAELECEKLGLKINSKNILKLRLFKEQKEFCAYSGEKIKLSDLQDEKMLEIDHIYPYSRSFDDSYMNKVLVFTKQNQEKLNKTPFEAFGNDNVKWQKIEVLAKNLPEKKQKRILDKNYKDKEQKDFKDRNLNDTRYIARLVLNYTKDYLDFLPLSDDENTKLKGSKVHVEAKSGMLTSALRHTWGFSTKDRNNHLHHAIDAAIIAYANNSIVKDFSDFKKEQESNSAELYAKKISELDYKNKRKFFEPFSGFRQKVLDKIDEIFVSKPERKKPSGALHEETFRKEEEFYQSYGGKEGVLKALELGKIRKVNGKIVKNGDMFRVDIFKHKKTNKFYAVPIYTMDFALKVLPNKAVARSKKGEIKDWILMDENYEFCFSLYKDSLILIQTKDMQEPELVYFNAFTSSTVSLIVSKHDNKFETLSKNLKVFEKYIVSALGEVTKAEFRQREDFKNELR

SEQ ID NO: 353 - protein, 984 aa, Campylobacter jejuni
MARILAFDIGISSIGWAFSENDELKDCGVRIFTKAENPKTGESLALPRRLARSARKRLARRKARLNHLKHLIANEFKLNYEDYQSFDESLAKAYKGSLISPYELRFRALNELLSKQDFARVILHIAKRRGYDDIKNNGDEEKGKILKAIKQNEEKLVNYQSVGEYLYKEYFQKFKENSKEFINVRNKKESYERCITQSFLKYELKLIFQKQREFGFSFSKKFEEEVLSVAFYKRALKDFSHLVGNCSFFTDEKRAPKNSPLAFMFVALTRIINILNNLKNTEGILYTKDDLNALLNEVLKNGTLTYKQTKKLLGLSDDYEFKGEKGTYFIEFKKYKEFIKALGEHNLSQDDLNEIAKDITLIKDEIKLKKALAKYDLNQNQIDSLSKLEFKDHLNISFKALKLITPLMLEGKKYDEACNELNLKVAINEDKKDFLPAFNETYYKDEVTNPVVLRAIKEYRKILNALLKKYGKVHKINIELAREVGKNHSQRAKIEKEQNENYKAKKDAEIECEKLGLKINSKNILKLRLFKEQKEFCAYSGEKIKISDLQDEKMLEIDHIYPYSRSFDDSYMNKVLVFTKQNQEKLNQTPFEAFGNDSAKWQKIEVLAKNLPTKKQKRILDKNYKDKEQKDFKDRNLNDTRYIARLVLNYTKDYLDFLPLSDDENTKLNDTQKGSKVHVEAKSGMLTSALRHTWGFSAKDRNNHLHHAIDAVIIAYANNSIVKAFSDFKKEQESNSAELYAKKISELDYKNKRKFFEPFSGFRQKVLDKIDEIFVSKPERKKPSGALHEETFRKEEEFYQSYGGKEGVLKALELGKIRKVNGKIVKNGDMFRVDIFKHKKTNKFYAVPIYTMDFALKVLPNKAVARSKKGEIKDWILMDENYEFCFSLYKDSLILIQTKDMQEPEFVYYNAFTSSTVSLIVSKHDNKFETLSKNQKILFKNANEKEVIAKSIGIQNLKVFEKYIVSALGEVTKAEFRQREDFKK

SEQ ID NO: 354 - protein, 987 aa, Campylobacter jejuni
MARILAFDIGISSIGWAFSENDELKDCGVRIFTKAENPKTGESLALPRRLARSARKRLARRKARLNHLKHLIANEFKLNYEDYQSFDESLAKAYKGSLISPYELRFRALNELLSKQDFARVILHIAKRRGYDDIKNNGDEEKGKILKAIKQNEEKLVSYQSVGEYLYKEYFQKFKENSKEFINVRNKKESYERCIAQSFLKDELKLIFQKQREFGFSFSKKFEEEVLSVAFYKRALKDFSHLVGNCSFLLMKKERQKNSPLAFMFVALTRIINLLNNLKNTEGILYTKDDLNTLLNEALKNGTLTYKQTKKLLGLSNDYEFKGEKGTYFIEFQKYKEFVKALGEHNLSQDDLNEIAKDITLIKDEIKLKKALAKYDLNQNQIDSLSKLEFKDHLNISFKALKLITPLMLEGKKYDEACNELNLKVAINEDKKDFLPAFNETYYKDEVTNPVVLRAIKEYRKVLNALLKKYGKVHKINIELAREVGKNHSQRAKIEKEQNENYKAKKDAELECEKLGLKINSKNILKLRLFKEQKEFCVYSGEKIKISDLQDEKMLEIDHIYPYSRSFDDSYMNKVLVFTKQNQEKLNKTPFETFGNDRVKWQKIEVLAKNLPTKKQKRILDKNYKDKEQKDFKDRNLNDTRYIARLVLNYTKDYLDFLPLSDDENTKLNDTQKGSKVHVEAKSGMLTSTLRHTWGFSTKDRNNHLHHAIDAAIIAYANNSIVKAFSDFKKEQESNTAELYAKKISELDYKNKRKFFEPFSGFRQKLLDKIDEIFVSKPERKKPSGALHEETFRKEEEFYQSYGGKEGVLKALELGKIRKVNGKMVKNGDMFRVDIFKHKKTNKFYAVPIYTMDFALKVLPNKAVVQGKDKKSGLIKDWILMDENYEFCFSLYKDSLILIQTKDMQEPELVYYERLDSSNASLTVSKHDNKFETLSKNQKILFKNANEKEVIAKSIGIQNLKVFEKYIVSALGEVTKAEFRQREDFKK

SEQ ID NO: 355 - protein, 987 aa, Campylobacter jejuni
MARILAFDIGISSIGWAFSENDELKDCGVRIFTKAENPKTGESLALPRRLARSARKRLARRKARLNHLKHLIANEFKLNYEDYQSFDESLAKAYKGSLISPYELRFRALNELLSKQDFARVILHIAKRRGYDDIKNNGDEEKSEILKAIKQNEEKLVNYQSVGEYLYKEYFQKFKENSKEFINVRNKKESYERCIAQSFLKDELKLIFQKQREFGFSFSKKFEEEVLSVAFYKRALKDFSHLVGNCSFFTDEKRAPKNSPLAFMFVALTRIINLLNNLKNTEGILYTKDDLNTLLNEVLKNGTLTYKQTKKLLGLSDDYEFKGEKGTYFIEFKKYKEFIKALGEHNLSQDNLNEIAKDITLIKDEIKLKKALAKYDLNQNQIDSLSKLEFKDHLNISFKALKLITPLMLEGKKYDEAYNELNLKVAINEDKKDFLPAFNETYYKDEVTNPVVLRAIKEYRKVLNALLKKYGKVHKINIELAREVGKNHSQRAKIEKEQNENYKAKKDAELECEKLGLKINSKNILKLRLFKEQKEFCAYSGEKIKISDLQDEKMLEIDHIYPYSRSFDDSYMNKVLVFTKQNQEKLNQTPFEAFGNDSAKWQKIEVLAKNLPTKKQKRILDKNYKDKEQKDFKDRNLNDTRYIARLVLNYTKDYLDFLPLSDDENTKLNDTQKGSKVHVEAKSGMLTSALRHTWGFSAKDRNNHLHHAIDAVIIAYANNSIVKAFSDFKKEQESNSAELYAKKISELDYKNKRKFFEPFSGFRQKVLDKIDEIFVSKPERKKPSGALHEETFRKEEEFYQSYGGKEGVLKALELGKIRKVNGKIVKNGDMFRVDIFKHKKTNKFYPVPIYTMDFALKVLPNKAVVQGKDKKSGLIKDWILMDENYEFCFSLYKDSLILIQTKDMQEPELVYFNAFTSSTVSLIVSKHDNKFETLSKNQKILFKNANEKEVIAKSIGIQNLKVFEKYIVSALGEVTKAEFRQREDFKK

SEQ ID NO: 356 - protein, 987 aa, Campylobacter jejuni
MARILAFDIGISSIGWAFSENDELKDCGVRIFTKAENPKTGESLALPRRLARSARKRLARRKARLNHLKHLIANEFKLNYEDYQSFDESLAKAYKGSLISPYELRFRALNELLSKQDFARVILHIAKRRGYDDIKNNGDEEKSEILKAIKQNEEKLVNYQSVGEYLYKEYFQKFKENSKEFINVRNKKESYERCIAQSFLKDELKLIFQKQREFGFSFSKKFEEEVLSVAFYKRALKDFSHLVGNCSFFTDEKRAPKNSPLAFMFVALTRIINLLNNLKNTEGILYTKDDLNTLLNEVLKNGTLTYKQTKKLLGLSDDYEFKGEKGTYFIEFKKYKEFIKALGEHNLSQDNLNEIAKDITLIKDEIKLKKALAKYDLNQNQIDSLSKLEFKDHLNISFKALKLITPLMLEGKKYDEAYNELNLKVAINEDKKDFLPAFNETYYKDEVTNPVVLRAIKEYRKVLNALLKKYGKVHKINIELAREVGKNHSQRAKIEKEQNENYKAKKDAELECEKLGLKINSKNILKLRLFKEQKEFCAYSGEKIKISDLQDEKMLEIDHIYPYSRSFDDSYMNKVLVFTKQNQEKLNQTPFEAFGNDSAKWQKIEVLAKNLPTKKQKRILDKNYKDKEQKDFKDRNLNDTRYIARLVLNYTKDYLDFLPLSDDENTKLNDTQKGSKVHVEAKSGMLTSALRHTWGFSAKDRNNHLHHAIDAVIIAYANNSIVKAFSDFKKEQESNSAELYAKKISELDYKNKRKFFEPFSGFRQKVLDKIDEIFVSKPERKKPSGALHEETFRKEEEFHQSYGGKEGVLKALELGKIRKVNGKIVKNGDMFRVDIFKHKKTNKFYAVPIYTMDFALKVLPNKAVVQGKDKKSGLIKDWILMDENYEFCFSLYKDSLILIQTKDMQEPELVYFNAFTSSTVSLIVSKHDNKFETLSKNQKILFKNANEKEVIAKSIGIQNLKVFEKYIVSALGEVTKAEFRQREDFKK

SEQ ID NO: 357 - protein, 987 aa, Campylobacter jejuni
MARILAFDIGISSIGWAFSENDELKDCGVRIFTKAENPKTGESLALPRRLARSARKRLARRKARLNHLKHLIANEFKLNYEDYQSFDESLAKAYKGSLISPYELRFRALNELLSKQDFARVILHIAKRRGYDDIKNNGDEEKSEILKAIKQNEEKLVNYQSVGEYLYKEYFQKFKENSKEFINVRNKKESYERCIAQSFLKDELKLIFQKQREFGFSFSKKFEEEVLSVAFYKRALKDFSHLVGNCSFFTDEKRAPKNSPLAFMFVALTRIINLLNNLKNTEGILYTKDDLNTLLNEVLKNGTLTYKQTKKLLGLSDDYEFKGEKGTYFIEFKKYKEFIKALGEHNLSQDNLNEIAKDITLIKDEIKLKKALAKYDLNQNQIDSLSKLEFKDHLNISFKALKLITPLMLEGKKYDEAYNELNLKVAINEDKKDFLPAFNETYYKDEVTNPVVLRAIKEYRKVLNALLKKYGKVHKINIELAREVGKNHSQRAKIEKEQNENYKAKKDAELECEKLGLKINSKNILKLRLFKEQKEFCAYSGEKIKISDLQDEKMLEIDHIYPYSRSFDDSYMNKVLVFTKQNQEKLNQTPFEAFGNDSAKWQKIEVLAKNLPTKKQKRILDKNYKDKEQKDFKDRNLNDTRYIARLVLNYTKDYLDFLPLSDDENTKLNDTQKGSKVHVEAKSGMLTSALRHTWGFSAKDRNNHLHHAIDAVIIAYANNSIVKAFSDFKKEQESNSAELYAKKISELDYKNKRKFFEPFSGFRQKVLDKIDEIFVSKPERKKPSGALHEETFRKEEEFYQSYGGKEGVLKALELGKIRKVNGKIVKNGDMFRVDIFKHKKTNKFYAVPIYTMDFALKVLPNKAVVQGKDKKSGLIKDWILMDENYEFCFSLYKDSLILIQTKDMQEPELVYFNAFTSSTVSLIVSKHDNKFETLSKNQKILFKNANEKEVIAKSIGIQNLKVFEKYIVSALGEVTKAEFRQREDFKK

SEQ ID NO: 358 - protein, 861 aa, Campylobacter jejuni
MARILAFDIGISSIGWAFSENDELKDCGVRIFTKAENPKTGESLALPRRLARSARKRLARRKARLNHLKHLIANEFKLNYEDYQSFDESLAKAYKGSLISPYELRFRALNELLSKQDFARVILHIAKRRGYDDIKNNGDEEKSEILKAIKQNEEKLVNYQSVGEYLYKEYFQKFKENSKEFINVRNKKESYERCITQSFLKDELKLIFQKQREFGFSFSKKFEEEVLSVAFYKRALKDFSHLVGNCSFFTDEKRAPKNSPLAFMFVALTRIINILNNLKNTEGILYTKDDLNALLNEVLKNGTLTYKQTKKLLGLSDDYEFKGEKGTYFIEFKKYKEFIKALGEHNLSQDDLNEIAKDITLIKDEIKLKKALAKYDLNQNQIDSLSKLEFKDHLNISFKALKLITPLMLEGKKYDEACNELNLKVAINEDKKDFLPAFNETYYKDEVTNPVVLRAIKEYRKILNALLKKYGKVHKINIELAREVGKNHSQRAKIEKEQNENYKAKKDAEIECEKLGLKINSKNILKLRLFKEQKEFCAYSGEKIKLSDLQDEKMLEIDHIYPYSRSFDDSYMNKVLVFTKQNQEKLNKTPFEAFGNDSTKWQKIEVLAKNLPEKKQKRILDKNYKDKEQKDFKDRNLNDTRYIARLVLNYTKDYLDFLPLSDDENTKLNDTQKGSKVHVEAKSGMLTSALRHTWGFSAKDRNNHLHHAIDAAIIAYANNSIVKAFSDFKKEQESNSVELYAKKISELDYKNKRKFFEPFSGFRQKVLDKIDEIFVSKPERKKPSGALHEETFRKEEEFYQSYGGKEGVLKALELGKIRKVNGKIVKNGDMFRVDIFKHKKTNKFLCCANLYYGFCFKSITK

SEQ ID NO: 359 - protein, 462 aa, Campylobacter jejuni
MARILAFDIGISSIGWAFSENDELKDCGVRIFTKAENPKTGESLALPRRLARSARKRLARRKARLNHLKHLIANEFKLNYEDYQSFDESLAKAYKGSLISPYELRFRALNELLSKQDFARVILHIAKRRGYDDIKNNGDEEKSEILKAIKQNEEKLVNYQSVGEYLYKEYFQKFKENSKEFINVRNKKESYERCITQSFLKDELKLIFQKQREFGFSFSKKFEEEVLSVAFYKRALKDFSHLVGNCSFFTDEKRAPKNSPLAFMFVALTRIINILNNLKNTEGILYTKDDLNALLNEVLKNGTLTYKQTKKLLGLSDDYEFKGEKGTYFIEFKKYKEFIKALGEHNLSQDDLNEIAKDITLIKDEIKLKKALAKYDLNQNQIDSLSKLEFKDHLNISFKALKLITPLMLEGKKYDEACNELNLKVAINEDKKDFLPAFNETYYKDEVTNPVVLRAIKEYRKS

SEQ ID NO: 360 - protein, 984 aa, Campylobacter jejuni
MARILAFDIGISSIGWAFSENDELKDCGVRIFTKAENPKTGESLALPRRLARSARKRLARRKARLNHLKHLIANEFKLNYEDYQSFDESLAKAYKGSLISPYELRFRALNELLSKQDFARVILHIAKRRGYDDIKNNGDEEKSEILKAIKQNEEKLVNYQSVGEYLYKEYFQKFKENSKEFINVRNKKESYERCITQSFLKDELKLIFQKQREFGFSFSKKFEEEVLSVAFYKRALKDFSHLVGNCSFFTDEKRAPKNSPLAFMFVALTRIINLLNNLKNTEGILYTKDDLNALLNEVLKNGTLTYKQTKKLLGLSDDYEFKGEKGTYFIEFKKYKEFIKALDEHSLSQDDLNEIAKDITLIKDEIKLKKALAKYDLNQNQIDSLSKLEFKDHLNISFKALKLITPLMLEGKKYDEACNELNLKVAINEDKKDFLPAFNETYYKDEVTNPVVLRAIKEYRKILNALLKKYGKVHKINIELAREVGKNHSQRAKIEKEQNENYKAKKDAEIECEKLGLKINSKNILKLRLFKEQKEFCAYSGEKIKISDLQDEKMLEIDHIYPYSRSFDDSYMNKVLVFTKQNQEKLNKTPFEAFGNDGVKWQKIEVLAKNLPEKKQKRILDKNYKDKEQKDFKDRNLNDTRYIARLVLNYTKDYLDFLPLSDDENTKLNDTQKGSKVHVEAKSGMLTSALRHTWGFSTKDRNNHLHHAIDAAIIAYANNSIVKAFSDFKKEQESNSAELYAKKISELDYKNKRKFFEPFSGFRQKVLDKIDEIFVSKPERKKPSGALHEETFRKEEEFYQSYGGKEGVLKALELGKIRKVNGKIVKNGDMFRVDIFKHKKTNKFYAVPIYTMDFALKVLPNKAVARSKKGEIKDWILMDENYEFCFSLYKDSLILIQTKDMQEPELVYFNAFTSSTVSLVVSKHDNKFETLSKNQKILFKNANEKEVIAKSIGIQNLKVFEKYIVSALGEVTKAEFRQREDFKK

SEQ ID NO: 361 - protein, 984 aa, Campylobacter jejuni
MARILAFDIGISSIGWAFSENDELKDCGVRIFTKAENPKTGESLALPRRLARSARKRLARRKARLNHLKHLIANEFKLNYEDYQSFDESLAKAYKGSLISPYELRFRALNELLSKQDFARVILHIAKRRGYDDIKNSDDKEKGAILKAIKQNEEKLANYQSVGEYLYKEYFQKFKENSKEFTNVRNKKESYERCIAQSFLKDELKLIFKKQREFGFSFSKKFEEEVLSVAFYKRALKDFSHLVGNCSFFTDEKRAPKNSPLAFMFVALTRIINLLNNLKNTEGILYTKDDLNALLNEVLKNGTLTYKQTKKLLGLSDDYEFKGEKGTYFIEFKKYKEFIKALGDHSLSQDDLNEIAKDITLIKDEIKLKKALAKYDLNQNQIDSLSKLEFKDHLNISFKALKLITPLMLEGKKYDEACNELNLKVAINEDKKDFLPAFNETYYKDEVTNPVVLRAIKEYRKVLNALLKKYGKVHKINIELAREVGKNYSQRAKIEKEQNENYKAKKDAELECEKLGLKINSKNILKLRLFKEQKEFCAYSGEKIKISDLQDEKMLEIDHIYPYSRSFDDSYMNKVLVFTKQNQEKLNQTPFEAFGNDSAKWQKIEVLAKNLPTKKQKRILDKNYKDKEQKDFKDRNLNDTRYIARLVLNYTKDYLDFLPLSDDENTKLNDTQKGSKVHVEAKSGMLTSALRHTWGFSAKDRNNHLHHAIDAVIIAYANNSIVKAFSDFKKEQESNSAELYAKKISELDYKNKRKFFEPFSGFRQKVLDKIDEIFVSKPERKKPSGALHEETFRKEEEFYQSYGGKEGVLKALELGKIRKVNGKIVKNGDMFRVDIFKHKKTNKFYAVPIYTMDFALKVLPNKAVARSKKGEIKDWILMDENYEFCFSLYKDSLILIQTKDMQEPEFVYYNAFTSSTVSLIVSKHDNKFETLSKNQKILFKNANEKEVIAKSIGIQNLKVFEKYIVSALGEVTKAEFRQREDFKK

SEQ ID NO: 362 - protein, 984 aa, Campylobacter jejuni
MARILAFDIGISSIGWAFSENDELKDCGVRIFTKAENPKTGESLALPRRLARSARKRLARRKARLNHLKHLIANEFKLNYEDYQSFDESLAKAYKGSLISPYELRFRALNELLSKQDFARVILHIAKRRGYDDIKNSDDKEKGAILKAIKQNEEKLANYQSVGEYLYKEYFQKFKENSKEFTNVRNKKESYERCIAQSFLKDELKLIFKKQREFGFSFSKKFEEEVLSVAFYKRALKDFSHLVGNCSFFTDEKRAPKNSPLAFMFVALTRIINLLNNLKNTEGILYTKDDLNTLLNEVLKNGTLTYKQTKKLLGLSDDYEFKGEKGTYFIEFKKYKEFIKALGEHNLSQDDLNEIAKDITLIKDEIKLKKALAKYDLNQNQIDSLSKLEFKDHLNISFKALKLITPLMLEGKKYDEACNELNLKVAINEDKKDFLPAFNETYYKDEVTNPVVLRAIKEYRKVLNALLKKYGKVHKINIELAREVGKNYSQRAKIEKEQNENYKAKKDAELECEKLGLKINSKNILKLRLFKEQKEFCAYSGEKIKISDLQDEKMLEIDHIYPYSRSFDDSYMNKVLVFTKQNQEKLNKTPFEAFGNDSTKWQKIEVLAKNLPEKKQKRILDKNYKDKEQKDFKDRNLNDTRYIARLVLNYTKDYLDFLPLSDDENTKLNDTQKGLKVHVEAKSGMLTSALRHTWGFSAKDRNNHLHHAIDAVIIAYANNSIVKAFSDFKKEQESNSAELYAKKISELDYKNKRKFFEPFSGFRQKVLDKIDEIFVSKPERKKPSGALHEETFRKEEEFYQSYGGKEGVLKALELGKIRKVNGKIVKNGDMFRVDIFKHKKTNKFYAVPIYTMDFALKVLPNKAVARSKKGEIKDWILMDENYEFCFSLYKDSLILIQTKDMQEPEFVYYNAFTSSTVSLIVSKHDNKFETLSKNQKILFKNANEKEVIAKSIGIQNLKVFEKYIVSALGEVTKAEFRQREDFKK

SEQ ID NO: 363 - protein, 984 aa, Campylobacter jejuni
MARILAFDIGISSIGWAFSENDELKDCGVRIFTKAENPKTGESLALPRRLARSARKRLARRKARLNHLKHLIANEFKLNYEDYQSFDESLAKAYKGSLISPYELRFRALNELLSKQDFARVILHIAKRRGYDDIKNSDDKEKGAILKAIKQNEEKLANYQSVGEYLYKEYFQKFKENSKEFTNVRNKKESYERCIAQSFLKDELKLIFKKQREFGFSFSKKFEEEVLSVAFYKRALKDFSHLVGNCSFFTDEKRAPKNSPLAFMFVALTRIINLLNNLKNTEGILYTKDDLNALLNEVLKNGTLTYKQTKKLLGLSDDYEFKGEKGTYFIEFKKYKEFIKALGDHSLSQDDLNEIAKDITLIKDEIKLKKALAKYDLNQNQIDSLSKLEFKDHLNISFKALKLITPLMLEGKKYDEACNELNLKVAINEDKKDFLPAFNETYYKDEVTNPVVLRAIKEYRKVLNALLKKYGKVHKINIELAREVGKNYSQRAKIEKEQNENYKAKKDAELECEKLGLKINSKNILKLRLFKEQKEFCAYSGEKIKISDLQDEKMLEIDHIYPYSRSFDDSYMNKVLVFTKQNQEKLNQTPFEAFGNDSAKWQKIEVLAKNLPTKKQKRILDKNYKDKEQKNFKDRNLNDTRYIARLVLNYTKDYLDFLPLSDDENTKLNDTQKGSKVHVEAKSGMLTSALRHTWGFSAKDRNNHLHHTIDAVIIAYANNSIVKAFSDFKKEQESNSAELYAKKISELDYKNKRKFFEPFSGFRQKVLDKIDEIFVSKPERKKPSGALHEETFRKEEEFYQSYGGKEGVLKALELGKIRKVNGKIVKNGDMFRVDIFKHKKTNKFYAVPIYTMDFALKVLPNKAVARSKKGEIKDWILMDENYEFCFSLYKDSLILIQTKDMQEPEFVYYNAFTSSTVSLIVSKHDNKFETLSKNQKILFKNANEKEVIAKSIGIQNLKVFEKYIVSALGEVTKAEFRQREDFKK

SEQ ID NO: 364 - protein, 984 aa, Campylobacter jejuni
MARILAFDIGISSIGWAFSENDELKDCGVRIFTKAENPKTGESLALPRRLARSARKRLARRKARLNHLKHLIANEFKLNYEDYQSFDESLAKAYKGSLISPYELRFRALNELLSKQDFARVILHIAKRRGYDDIKNSDDKEKGAILKAIKQNEEKLANYQSVGEYLYKEYFQKFKENSKEFTNVRNKKESYERCIAQSFLKDELKLIFKKQREFGFSFSKKFEEEVLSVAFYKRALKDFSHLVGNCSFFTDEKRAPKNSPLAFMFVALTRIINLLNNLKNTEGILYTKDDLNTFLNEVLKNGTLTYKQTKKLLGLSDDYEFKGEKGTYFIEFKKYKEFIKALGDHNLSQDDLNEIAKDITLIKDEIKLKKALAKYDLNQNQIDSLSKLEFKDHLNISFKALKLITPLMLEGKKYDEACNELNLKVAINEDKKDFLPAFNETYYKDEVTNPVVLRAIKEYRKVLNALLKKYGKVHKINIELAREVGKNHSQRAKIEKEQNENYKAKKDAELECEKLGLKINSKNILKLRLFKEQKEFCAYSGEKIKISDLQDEKMLEIDHIYPYSRSFDDSYMNKVLVFTKQNQEKLNKTPFEAFGNDSAKWQKIEVLAKNLPTKKQKRILDKNYKDKEQKDFKDRNLNDTRYIARLVLNYTKDYLDFLPLSDDENTKLNDTQKGSKVHVEAKSGMLTSALRHTWGFSTKDRNNHLHHAIDAVIIAYANNSIVKAFSDFKKEQESNSAELYAKKISELDYKNKRKFFEPFSGFRQKVLDKIDEIFVSKPERKKPSGALHEETFRKEEEFYQSYGGKEGVLKALELGKIRKVNGKIVKNGDMFRVDIFKHKKTNKFYAVPIYTMDFALKVLPNKAVARSKKGEIKDWILMDENYEFCFSLYKDSLILIQTKDMQEPEFVYYNAFTSSTVSLIVSKHDNKFETLSKNQKILFKNANEKEVIAKSIGIQNLKVFEKYIVSALGEVTKAEFRQREDFKK

SEQ ID NO: 365 - protein, 987 aa, Campylobacter jejuni
MARILAFDIGISSIGWAFSENDELKDCGVRIFTKAENPKTGESLALPRRLARSARKRLARRKARLNHLKHLIANEFKLNYEDYQSFDESLAKAYKGSLISPYELRFRALNELLSKQDFARVILHIAKRRGYDDIKNSDDKEKGAILKAIKQNEEKLANYQSVGEYLYKEYFQKFKENSKEFTNVRNKKESYERCIAQSFLKDELKLIFKKQREFGFSFSKKFEEEVLSVAFYKRALKDFSHLVGNCSFFTDEKRAPKNSPLAFMFVALTRIINLLNNLKNTEGILYTKDDLNTLLNEVLKNGTLTYKQTKKLLGLSDDYEFKGEKGTYFIEFKKYKEFIKSLGDHSLSQDDLNEIAKDITLIKDEIKLKKALAKYDLNQNQIDSLSKLEFKDHLNISFKALKLITPLMLEGKKYDEACNELNLKVAINEDKKDFLPAFNETYYKDEVTNPVVLRAIKEYRKVLNALLKKYGKVHKINIELAREVGKNHSQRAKIEKEQNENYKAKKDAELECEKLGLKINSKNILKLRLFKEQKEFCAYSGEKIKISDLQDEKMLEIDHIYPYSRSFDDSYMNKVLVFTKQNQEKLNQTPFEAFGNDSAKWQKIEVLAKNLPTKKQKRILDKNYKDKEQKNFKDRNLNDTRYIARLVLNYTKDYLDFLPLSDDENTKLNDTQKGSKVHVEAKSGMLTSALRHTWGFSAKDRNNHLHHAIDAVIIAYANNSIVKAFSDFKKEQESNSAELYAKKISELDYKNKRKFFEPFSGFRQKVLDKIDEIFVSKPERKKPSGALHEETFRKEEEFYQSYGGKEGVLKALELGKIRKVNGKIVKNGDMFRVDIFKHKKTNKFYAVPIYTMDFALKVLPNKAVARSKKGEIKDWILMDENYEFCFSLYKDSLILIQTKDMQEPEFVYYNAFTSSTVSLIVSKHDNKFETLSKNQKILFKNANEKEVIAKSIGIQNLKVFEKYIVSALGEVTKAEFRQREDFKNELR

SEQ ID NO: 366 - protein, 987 aa, Campylobacter jejuni
MARILAFDIGISSIGWAFSENDELKDCGVRIFTKAENPKTGESLALPRRLARSARKRLARRKARLNHLKHLIANEFKLNYEDYQSFDESLAKAYKGSLISPYELRFRALNELLSKQDFARVILHIAKRRGYDDIKNSDDKEKGAILKAIKQNEEKLANYQSVGEYLYKEYFQKFKENSKEFTNVRNKKESYERCIAQSFLKDELKLIFKKQREFGFSFSKKFEEEVLSVAFYKRALKDFSHLVGNCSFFTDEKRAPKNSPLAFMFVALTRIINLLNNLKNTEGILYTKDDLNALLNEVLKNGTLTYKQTKKLLGLSDDYEFKGEKGTYFIEFKKYKEFIKALGDHSLSQDDLNEIAKDITLIKDEIKLKKALVKYDLNQNQIDSLSKLEFKDHLNISFKALKLITPLMLEGKKYDEACNELNLKVAINEDKKDFLPAFNETYYKDEVTNPVVLRAIKEYRKVLNALLKKYGKVHKINIELAREVGKNYSQRAKIEKEQNENYKAKKDAELECEKLGLKINSKNILKLRLFKEQKEFCAYSGEKIKISDLQDEKMLEIDHIYPYSRSFDDSYMNKVLVFTKQNQEKLNQTPFEAFGNDSAKWQKIEVLAKNLPTKKQKRILDKNYKDKEQKDFKDRNLNDTRYIARLVLNYTKDYLDFLPLSDDENTKLNDTQKGSKVHVEAKSGMLTSALRHTWGFSAKDRNNHLHHAIDAVIIAYANNSIVKAFSDFKKEQESNSAELYAKKISELDYKNKRKFFEPFSGFRQKVLDKIDEIFVSKPERKKPSGALHEETFRKEEEFYQSYGGKEGVLKALELGKIRKVNGKIVKNGDMFRVDIFKHKKTNKFYAVPIYTMDFALKVLPNKAVARSKKGEIKDWILMDENYEFCFSLYKDSLILIQTKDMQEPELVYFNAFTSSTVSLIVSKHDNKFETLSKNQKILFKNANEKEVIAKSIGIQNLKVFEKYIVSALGEVTKAEFRQREDFKNELR

SEQ ID NO: 367 - protein, 983 aa, Campylobacter jejuni; identical to SEQ ID NO: 245

SEQ ID NO: 368 - protein, 987 aa, Campylobacter jejuni
MARILAFDIGISSIGWAFSENDELKDCGVRIFTKAENPKTGESLALPRRLARSARKRLARRKARLNHLKHLIANEFKLNYEDYQSFDESLAKAYKGSLISPYELRFRALNELLSKQDFARVILHIAKRRGYDDIKNSDDKEKGAILKAIKQNEEKLVNYQSVGEYLYKEYFQKFKENSKEFTNVRNKKESYERCIAQSFLKDELKLIFKKQREFGFSFSKKFEEEVLSVAFYKRALKDFSHLVGNCSFFTDEKRAPKNSPLAFMFVALTRIINLLNNLKNTEGILYTKDDLNALLNEVLKNGTLTYKQTKKLLGLSDDYEFKGEKGTYFIEFKKYKEFIKALGDHSLSQDDLNEIAKDITLIKDEIKLKKALAKYDLNQNQIDSLSKLEFKDHLNISFKALKLITPLMLEGKKYDEACNELNLKVAINEDKKDFLPAFNETYYKDEVTNPVVLRAIKEYRKVLNALLKKYGKVHKINIELAREVGKNYSQRAKIEKEQNENYKAKKDAELECEKLGLKINSKNILKLRLFKEQKEFCAYSGEKIKISDLQDEKMLEIDHIYPYSRSFDDSYMNKVLVFTKQNQEKLNQTPFEAFGNDSAKWQKIEVLAKNLPTKKQKRILDKNYKDKEQKDFKDRNLNDTRYIARLVLNYTKDYLDFLPLSDDENTKLNDTQKGSKVHVEAKSGMLTSALRHTWGFSAKDRNNHLHHAIDAVIIAYANNSIVKAFSDFKKEQESNSAELYAKKISELDYKNKRKFFEPFSGFRQKVLDKIDEIFVSKPERKKPSGALHEETFRKEEEFYQSYGGKEGVLKALELGKIRKVNGKIVKNGDMFRVDIFKHKKTNKFYAVPIYTMDFALKVLPNKAVARSEKGEIKDWILMDENYEFCFSLYKDSLILIQTKDMQEPELVYFNAFTSSTVSLIVSKHDNKFETLSKNQKILFKNANEKEVIAKSIGIQNLKVFEKYIVSALGEVTKAEFRQREDFKNELR

SEQ ID NO: 369 - protein, 987 aa, Campylobacter jejuni
MARILAFDIGISSIGWAFSENDELKDCGVRIFTKAENPKTGESLALPRRLARSARKRLARRKARLNHLKHLIANEFKLNYEDYQSFDESLAKAYKGSLISPYELRFRALNELLSKQDFARVILHIAKRRGYDNIKNSDNEEKSEILKAIKQNEEKLVNYQSVGEYLYKEYFQKFKENSKEFINVRNKKESYERCIAQSFLKDELKLIFQKQREFGLSFSKKFEEEVLSVAFYKRALKDFSHLVGNCSFFTDEKRAPKNSPLAFMFVALTRIINLLNNLKNTEGILYTKDDLNTLLNEVLKNGTLTYKQTKKLLGLSDDYEFKGEKGTYFIEFKKYKEFIKALGDHSLSQDDLNEIAKDITLIKDEIKLKKALAKYDLNQNQIDSLSKLEFKDHLNISFKALKLITPLMLEGKKYDEACNELNLKVVINEDKKDFLPAFNETYYKDEVTNPVVLRAIKEYRKVLNALLKKYGKVHKINIELAREVGKNHSQRAKIEKEQNENYKAKKDAELECEKLGLKINNKNILKLRLFKEQKEFCAYSGEKIKLSDLQDEKMLEIDHIYPYSRSFDDSYMNKVLVFTKQNQEKLNKTPFEAFGNDSTKWQKIEVLAKNLPTKKQKRILDKNYKDKEQKDFKDRNLNDTRYIARLVLNYTKDYLDFLPLSDDENTKLNDIQKGSKVHVEAKSGMLTSALRHTWGFSTKDRNNHLHHAIDAVIIAYANNSIVKAFSDFKKEQESNSAELYAKKISELDYKNKRKFFEPFSGFRQKVLDKIDEIFVSKPERKKPSGALHEETFRKEEEFYQSYGGKEGVLKALELGKIRKVNGKIVKNGDMFRVDIFKHKKTNKFYAVPIYTMDFALKVLPNKAVVQGKDKKSGLIKDWILMDENYEFCFSLYKDSLILIQTKDMQEPEFVYYNAFTSSTVSLIVSKHDNKFETLSKNQKILFKNANEKEVIAKSIGIQNLKVFEKYIVSALGEVTKAEFRQREDFKK

SEQ ID NO: 370 - protein, 984 aa, Campylobacter jejuni
MARILAFDIGISSIGWAFSENDELKDCGVRIFTKAENPKTGESLALPRRLARSARKRLARRKARLNHLKHLIANEFKLNYEDYQSFDESLAKAYKGSLISPYELRFRALNELLSKQDFARVILHIVKRRGYDDIKNSDDKEKGAILKAIKQNEEKLANYQSVGEYLYKEYFQKFKENSKEFTNVRNKKESYERCIAQSFLKDELKLIFKKQREFGFSFSKKFEEEVLSVAFYKRALKDFSHLVGNCSFFTDEKRAPKNSPLAFMFVALTRIINLLNNLKNTEGILYTKDDLNTLLNEVLKNGTLTYKQTKKLLGLSDDYEFKGEKGTYFIEFKKYKEFIKALGDHSLSQDDLNEIAKDITLIKDEIKLKKALAKYDLNQNQIDSLSKLEFKDHLNISFKALKLITPLMLEGKKYDEACNELNLKVAINEDKKDFLPAFNETYYKDEVTNPVVLRAIKEYRKVLNALLKKYGKVHKINIELAREVGKNHSQRAKIEKEQNENYKAKKDAEFECEKLGLKINSKNILKLRLFKEQKEFCAYSGEKIKISDLQDEKMLEIDHIYPYSRSFDDSYMNKVLVFTKQNQEKLNKTPFEAFGNDSAKWQKIEVLAKNLPTKKQKRILDKNYKDKEQKDFKDRNLNDTRYIARLVLNYTKDYLDFLPLSDDENTKLNDTQKGSKVHVEAKSGMLTSALRHTWGFSTKDRNNHLHHAIDAVIIAYANNSIVKAFSDFKKEQESNSAELYAKKISELDYKNKRKFFEPFSGFRQKVLDKIDEIFVSKPERKKPSGALHEETFRKEEEFYQSYGGKEGVLKALELGKIRKVNGKIVKNGDMFRVDIFKHKKTNKFYAVPIYTMDFALKVLPNKAVARSKKGEIKDWILMDENYEFCFSLYKDSLILIQTKDMQEPEFVYYNAFTSSTVSLIVSKHDNKFETLSKNQKILFKNANEKEVIAKSIGIQNLKVFEKYIVSALGEVTKAEFRQREDFKK

SEQ ID NO: 371 - protein, 984 aa, Campylobacter jejuni
MARILAFDIGISSIGWAFSENDELKDCGVRIFTKAENPKTGESLALPRRLARSARKRLARRKARLNHLKHLIANEFKLNYEDYQSFDESLAKAYKGSLISPYELRFRALNELLSKQDFARVILHIVKRRGYDDIKNSDDKEKGTILKAIKQNEEKLANYQSVGEYLYKEYFQKFKENSKEFTNVRNKKESYERCIAQSFLKDELKLIFKKQREFGFSFSKKFEEEVLSVAFYKRALKDFSHLVGNCSFFTDEKRAPKNSPLAFMFVALTRIINLLNNLKNTEGILYTKDDLNTLLNEVLKNGTLTYKQTKKLLGLSDDYEFKGEKGTYFIEFKKYKEFIKALGEHNLSQDDLNEIAKDITLIKDEIKLKKALAKYDLNQNQIDSLSKLEFKDHLNISFKALKLITPLMLEGKKYDEACNELNLKVAINEDKKDFLPAFNETYYKDEVTNPVVLRAIKEYRKVLNALLKKYGKVHKINIELAREVGKNYSQRAKIEKEQNENYKAKKDAELECEKLGLKINSKNILKLRLFKEQKEFCAYSGEKIKISDLQDEKMLEIDHIYPYSRSFDDSYMNKVLVFTKQNQEKLNQTPFEAFGNDSAKWQKIEVLAKNLPTKKQKRILDKNYKDKEQKDFKDRNLNDTRYIARLVLNYTKDYLDFLPLSDDENTKLNDTQKGSKVHVEAKSGMLTSALRHTWGFSAKDRNNHLHHAIDAVIIAYANNSIVKAFSDFKKEQESNSAELYAKKISELDYKNKRKFFEPFSGFRQKVLDKIDEIFVSKPERKKPSGALHEETFRKEEEFYQSYGGKEGVLKALELGKIRKVNGKIVKNGDMFRVDIFKHKKTNKFYAVPIYTMDFALKVLPNKAVARSKKGEIKDWILMDENYEFCFSLYKDSLILIQTKDMQEPEFVYYNAFTSSTVSLIVSKHDNKFETLSKNQKILFKNANEKEVIAKSIGIQNLKVFEKYIVSALGEVTKAEFRQREDFKK

SEQ ID NO: 372 - protein, 987 aa, Campylobacter jejuni
MARILAFDIGISSIGWAFSENDELKDCGVRIFTKAENPKTGESLALPRRLARSARKRLARRKARLNHLKHLIANEFKLNYEDYQSFNESLAKAYKGSLISPYELRFRALNELLSKQDFARVILHIAKRRGYDDIKNSDDKEKGAILKVIKQNEEKLANYQSVGEYLYKEYFQKFKENSKEFTNVRNKKESYERCIAQSFLKDELKLIFQKQREFGFSFSKKFEEEVLSVAFYKRALKDFSHLVGNCSFFTDEKRAPKNSPLAFMFVALTRIINLLNNLKNTEGILYTKDDLNALLNEVLKNGTLTYKQTKKLLGLSDDYEFKGEKGTYFIEFKKYKEFIKALGDHSLSQDDLNEIAKDITLIKDEIKLKKALAKYDLNQNQIDSLSKLEFKDHLNISFKALKLITPLMLEGKKYDEACNELNLKVAINEDKKDFLPAFNETYYKDEVTNPVVLRAIKEYRKVLNALLKKYGKVHKINIELAREVGKNYSQRAKIEKEQNENYKAKKDAELECEKLGLKINSKNILKLRLFKEQKEFCAYSGEKIKISDLQDEKMLEIDHIYPYSRSFDDSYMNKVLVFTKQNQEKLNQTPFEAFGNDSAKWQKIEVLAKNLPTKKQKRILDKNYKDKEQKDFKDRNLNDTRYIARLVLNYTKDYLDFLPLSDDENTKLNDTQKGSKVHVEAKSGMLTSALRHTWGFSAKDRNNHLHHAIDAVIIAYANNSIVKAFSDFKKEQESNSAELYAKKISELDYKNKRKFFEPFSGFRQKVLDKIDEIFVSKPERKKPSGALHEETFRKEEEFYQSYGGKEGVLKALELGKIRKVNGKIVKNGDMFRVDIFKHKKTNKFYAVPIYTMDFALKVLPNKAVARSKKGEIKDWILMDENYEFCFSLYKDSLILIQTKDMQEPELVYFNAFTSSTVSLIVSKHDNKFETLSKNQKILFKNANEKEVIAKSIGIQNLKVFEKYIVSALGEVTKAEFRQREDFKNELR

SEQ ID NO: 373 - protein, 984 aa, Campylobacter jejuni
MARILAFDIGISSIGWAFSENDELKDCGVRIFTKAENPKTGESLALPRRLARSARKRLARRKARLNRLKHLIANEFKLNYEDYQSFDESLAKAYKGSLISPYELRFRALNELLSKQDFARVILHIAKRRGYDDIKNSDDKEKGAILKAIKQNEEKLANYQSVGEYLYKEYFQKFKENSKEFTNVRNKKESYERCIAQSFLKDELKLIFKKQREFGFSFSKKFEEEVLSVAFYKRALKDFSHLVGNCSFFTDEKRAPKNSPLAFMFVALTRIINLLNNLKNTEGILYTKDDLNALLNEVLKNGTLTYKQTKKLLGLSDDYEFKGEKGTYFIEFKKYKEFIKALGDHSLNQDDLNEIAKDITLIKDEIKLKKALAKYDLNQNQIDSLSKLEFKDHLNISFKALKLITPLMLEGKKYDEACNELNLKVAINEDKKDFLPAFNETYYKDEVTNPVVLRAIKEYRKVLNALLKKYGKVHKINIELAREVGKNYSQRAKIEKEQNENYKAKKDAELECEKLGLKINSKNILKLRLFKEQKEFCVYSGEKIKISDLQDEKMLEIDHIYPYSRSFDDSYMNKVLVFTKQNQEKLNQTPFEAFGNDSAKWQKIEVLAKNLPTKKQKRILDKNYKDKEQKDFKDRNLNDTRYIARLVLNYTKDYLDFLPLSDDENTKLNDTQKGSKVYVEAKSGMLTSALRHTWGFSTKDRNNHLHHAIDAVIIAYANNSIVKAFSDFKKEQESNSAELYAKKISELDYKNKRKFFEPFSGFRQKVLDKIDEIFVSKPERKKPSGALHEETFRKEEEFYQSYGGKEGVLKALELGKIRKVNGKIVKNGDMFRVDIFKHKKTNKFYAVPIYTMDFALKVLPNKAVARSKKGEIKDWILMDENYEFCFSLYKDSLILIQTKDMQEPEFVYYNAFTSSTVSLIVSKHDNKFETLSKNQKILFKNANEKEVIAKSIGIQNLKVFEKYIVSALGEVTKAEFRQREDFKK

SEQ ID NO: 374 - protein, 984 aa, Campylobacter jejuni
MARILAFDIGISSIGWAFSENDELKDCGVRIFTKVENPKTGESLALPRRLARSARKRLARRKARLNHLKHLIANEFKLNYEDYQSFDESLAKAYKGSLISPYELRFRALNELLSKQDFARVILHIAKRRGYDDIKNSDDKEKGAILKAIKQNEEKLANYQSVGEYLYKEYFQKFKENSKEFTNVRNKKESYERCIAQSFLKDELKLIFKKQREFGFSFLKKFEEEVLSVAFYKRALKDFSHLVGNCSFFTDEKRAPKNSPLAFMFVALTRIINLLNNLKNTEGILYTKDDLNALLNEVLKNGTLTYKQTKKLLGLSDDYEFKGEKGTYFIEFKKYKEFIKALGEHNLSQDDLNEIAKDITLIKDEIKLKKALAKYDLNQNQIDSLSKLEFKDHLNISFKALKLITPLMLEGKKYDEAYNELNLKVAINEDKKDFLPAFNETYYKDEVTNPVVLRAIKEYRKVLNALLKKYGKVHKINIELAREVGKNHSQRAKIEKEQNENYKAKKDAELECEKLGLKINSKNILKLRLFKEQKEFCAYSGEKIKISDLQDEKMLEIDHIYPYSRSFDDSYMNKVLVFTKQNQEKLNQTPFEAFGNDSAKWQKIEVLAKNLPTKKQKRILDKNYKDKEQKDFKDRNLNDTRYIARLVLNYTKDYLDFLPLSDDENTKLNDTQKGSKVHVEAKSGMLTSALRHTWGFSAKDRNNHLHHAIDAVIIAYANNSIVKAFSDFKKEQESNSAELYAKKISELDYKNKRKFFEPFSGFRQKVLDKIDEIFVSKPERKKPSGALHEETFRKEEEFYQSYGGKEGVLKALELGKIRKVNGKIVKNGDMFRVDIFKHKKTNKFYAVPIYTMDFALKVLPNKAVARSKKGEIKDWILMDENYEFCFSLYKDSLILIQTKDMQEPELVYFNAFTSSTVSLIVSKHDNKFETLSKNQKILFKNANEKEVIAKSIGIQNLKVFEKYIVSALGEVTKAEFRQREDFKK

SEQ ID NO: 375 - protein, 984 aa, Campylobacter jejuni
MARILAFDIGISSIGWAFSENDELKDCGVRIFTKVENPKTGESLALPRRLARSARKRLARRKARLNHLKHLIANEFKLNYEDYQSFDESLAKAYKGSLISPYELRFRALNELLSKQDFARVILHIAKRRGYDDIKNSDDKEKGAILKAIKQNEEKLANYQSVGEYLYKEYFQKFKENSKEFTNVRNKKESYERCIAQSFLKDELKLIFKKQREFGFSFSKKFEEEVLSVAFYKRALKDFSHLVGNCSFFTDEKRAPKNSPLAFMFVALTRIINLLNNLKNTEGILYTKDDLNALLNEVLKNGTLTYKQTKKLLGLSDDYEFKGEKGTYFIEFKKYKEFIKALGEHNLSQDDLNEIAKDITLIKDEIKLKKALAKYDLNQNQIDSLSKLEFKDHLNISFKALKLITPLMLEGKKYDEACNELNLKVAINEDKKDFLPAFNETYYKDEVTNPVVLRAIKEYRKVLNALLKKYGKVHKINIELAREVGKNHSQRAKIEKEQNENYKAKKDAELECEKLGLKINSKNILKLRLFKEQKEFCAYSGEKIKISDLQDEKMLEIDHIYPYSRSFDDSYMNKVLVFTKQNQEKLNKTPFEAFGNDSAKWQKIEVLAKNLPTKKQKRILDKNYKDKEQKDFKDRNLNDTRYIARLVLNYTKDYLDFLPLSNDENTKLNDTQKGSKVHVEAKSGMLTSALRHTWGFSTKDRNNHLHHAIDAVIIAYANNSIVKAFSDFKKEQESNSAELYAKKISELDYKNKRKFFEPFSGFRQKVLDKIDEIFVSKPERKKPSGALHEETFRKEEEFYQSYGGKEGVLKALELGKIRKVNGKIVKNGDMFRVDIFKHKKTNKFYAVPIYTMDFALKVLPNKAVARSKKGEIKDWILMDENYEFCFSLYKDSLILIQTKDMQEPEFVYYNAFTSSTVSLIVSKHDNKFETLSKNQKILFKNANEKEVIAKSIGIQNLKVFEKYIVSALGEVTKAEFRQREDFKK

SEQ ID NO: 376 - protein, 984 aa, Campylobacter jejuni
MARILAFDIGISSIGWAFSENDELKDCGVRIFTKVENPKTGESLALPRRLARSARKRLARRKARLNHLKHLIANEFKLNYEDYQSFDESLAKAYKGSLISPYELRFRALNELLSKQDFARVILHIAKRRGYDDIKNSDDKEKGAILKAIKQNEEKLANYQSVGEYLYKEYFQKFKENSKEFTNVRNKKESYERCIAQSFLKDELKLIFKKQREFGFSFSKKFEEEVLSVAFYKRALKDFSHLVGNCSFFTDEKRAPKNSPLAFMFVALTRIINLLNNLKNTEGILYTKDDLNALLNEVLKNGTLTYKQTKKLLGLSDDYEFKGEKGTYFIEFKKYKEFIKALGEHNLSQDDLNEIAKDITLIKDEIKLKKALAKYDLNQNQIDSLSKLEFKDHLNISFKALKLITPLMLEGKKYDEACNELNLKVAINEDKKDFLPAFNETYYKDEVTNPVVLRAIKEYRKVLNALLKKYGKVHKINIELAREVGKNHSQRAKIEKEQNENYKAKKDAELECEKLGLKINSKNILKLRLFKEQKEFCAYSGEKIKISDLQDEKMLEIDHIYPYSRSFDDSYMNKVLVFTKQNQEKLNKTPFEAFGNDSAKWQKIEVLAKNLPTKKQKRILDKNYKDKEQKDFKDRNLNDTRYIARLVLNYTKDYLDFLPLSDDENTKLNDTQKGSKVHVEAKSGMLTSALRHTWGFSTKDRNNHLHHAIDAVIIAYANNSIVKAFSDFKKEQESNSAELYAKKISELDYKNKRKFFEPFSGFRQKVLDKIDEIFVSKPERKKPSGALHEETFRKEEEFYQSYGGKEGVLKALELGKIRKVNGKIVKNGDMFRVDIFKHKKTNKFYAVPIYTMDFALKVLPNKAVARSKKGEIKDWILMDENYEFCFSLYKDSLILIQTKDMQEPEFVYYNAFTSSTVSLIVSKHDNKFETLSKNQKILFKNANEKEVIAKSIGIQNLKVFEKYIVSALGEVTKAEFRQREDFKK

SEQ ID NO: 377 - protein, 984 aa, Campylobacter jejuni
MARILAFDIGISSIGWAFSENDELKDCGVRIFTKVENPKTGESLALPRRLARSARKRLARRKARLNHLKHLIANEFKLNYEDYQSFDESLAKAYKGSLISPYELRFRALNELLSKQDFARVILHIAKRRGYDDIKNSDDKEKGAILKAIKQNEEKLANYQSVGEYLYKEYFQKFKENSKEFTNVRNKKESYERCIAQSFLKDELKLIFKKQREFGFSFSKKFEEEVLSVAFYKRALKDFSHLVGNCSFFTDEKRAPKNSPLAFMFVTLTRIINLLNNLKNTEGILYTKDDLNALLNEVLKNGTLTYKQTKKLLGLSDDYEFKGEKGTYFIEFKKYKEFIKALGEHNLSQDDLNEIAKDITLIKDEIKLKKALAKYDLNQNQIDSLSKLEFKDHLNISFKALKLITPLMLEGKKYDEACNELNLKVAINEDKKDFLPAFNETYYKDEVTNPVVLRAIKEYRKVLNALLKKYGKVHKINIELAREVGKNHSQRAKIEKEQNENYKAKKDAELECEKLGLKINSKNILKLRLFKEQKEFCAYSGEKIKISDLQDEKMLEIDHIYPYSRSFDDSYMNKVLVFTKQNQEKLNKTPFEAFGNDSAKWQKIEVLAKNLPTKKQKRILDKNYKDKEQKDFKDRNLNDTRYIARLVLNYTKDYLDFLPLSDDENTKLNDTQKGSKVHVEAKSGMLTSALRHTWGFSTKDRNNHLHHAIDAVIIAYANNSIVKAFSDFKKEQESNSAELYAKKISELDYKNKRKFFEPFSGFRQKVLDKIDEIFVSKPERKKPSGALHEETFRKEEEFYQSYGGKEGVLKALELGKIRKVNGKIVKNGDMFRVDIFKHKKTNKFYAVPIYTMDFALKVLPNKAVARSKKGEIKDWILMDENYEFCFSLYKDSLILIQTKDMQEPEFVYYNAFTSSTVSLIVSKHDNKFETLSKNQKILFKNANEKEVIAKSIGIQNLKVFEKYIVSALGEVTKAEFRQREDFKK

SEQ ID NO: 378 - protein, 984 aa, Campylobacter jejuni
MARILAFDIGISSIGWAFSENDELKDCGVRIFTKVENPKTGESLALPRRLARSARKRLARRKARLNHLKHLIANEFKLNYEDYQSFDESLAKAYKGSLISPYELRFRALNELLSKQDFARVILHIAKRRGYDDIKNSDDKEKGAILKAIKQNEEKLANYQSVGEYLYKEYFQKFKENSKEFTNVRNKKESYERCIAQSFLKDELKLIFKKQREFGFSFSKKFEEEVLSVAFYKRALKDFSHLVGNCSFFTDEKRAPKNSPLAFMFVALTRIINLLNNLKNTEGILYTKDDLNALLNEVLKNGTLTYKQTKKLLGLSDDYEFKGEKGTYFIEFKKYKEFIKALGEHNLSQDDLNEIAKDITLIKDEIKLKKALAKYDLNQNQIDSLSKLEFKDHLNISFKALKLITPLMLEGKKYDEACNELNLKVAINEDKKDFLPAFNETYYKDEVTNPVVLRAIKEYRKVLNALLKKYGKVHKINIELAREVGKNHSQRAKIEKEQNENYKAKKDAELECEKLGLKINSKNILKLRLFKEQKEFCAYSGEKIKISDLQDEKMLEIDHIYPYSRSFDDSYMNKVLVFTKQNQEKLNKTPFEAFGNDSAKWQKIEVLAKNLPTKKQKRILDKNYKDKEQKDFKDRNLNDTRYIARLVLNYTKDYLDFLPLSDDENTKLNDTQKGSKVHVEAKSGMLTSALRHTWGFSTKDRNNHLHHAIDAVIIAYANNSIVKAFSDFKKEQESNSAELYAKKISELDYKNKRKFFEPFSGFRQKVLDKIDEIFVSKPERKKPSGALHEETFRKEEEFYQSYGGKEGVLKALELGKIRKVNGKIVKNGDMFRVDIFKHKKTNKFYAVPIYTMDFALKVLPNKAVARSKKGEIKDWILMDENYEFCFSLYKDSLILIQTKDMQEPEFVYYNAFTSSTVSLIVSKHDNKFETLSKNQKILFKNANEKEVIAKSIGIQNLKVFEKYIVSALGEVTKAEFIQREDFKK

SEQ ID NO: 379 - protein, 987 aa, Campylobacter jejuni
MARILAFDIGISSIGWAFSENDELKDCGVRIFTKVENPKTGESLALPRRLARSARKRLARRKARLNHLKHLIANEFKLNYEDYQSFDESLAKAYKGSLISPYELRFRALNELLSKQDFARVILHIAKRRGYDDIKNSDDKEKGAILKAIKQNEEKLANYQSVGEYLYKEYFQKFKENSKEFTNVRNKKESYERCIAQSFLKDELKLIFKKQREFGFSFSKKFEEEVLSVAFYKRALKDFSHLVGNCSFFTDEKRVPKNSPLAFMFVALTRIINLLNNLKNTEGILYTKDDLNALLNEVLKNGTLTYKQTKKLLGLSDDYEFKGEKGTYFIEFKKYKEFIKALGEHNLSQDDLNEIAKDITLIKDEIKLKKALAKYDLNQNQIDSLSKLEFKDHLNISFKALKLITPLMLEGKKYDEACNELNLKVAINEDKKDFLPAFNETYYKDEVTNPVVLRAIKEYRKVLNALLKKYGKVHKINIELAREVGKNHSQRAKIEKEQNENYKAKKDAELECEKLGLKINSKNILKLRLFKEQKEFCAYSGEKIKISDLQDEKMLEIDHIYPYSRSFDDSYMNKVLVFTKQNQEKLNQTPFEAFGNDSAKWQKIEVLAKNLPTKKQKRILDKNYKDKEQKNFKDRNLNDTRYIARLVLNYTKDYLDFLPLSDDENTKLNDTQKGSKVHVEAKSGMLTSALRHTWGFSAKDRNNHLHHAIDAVIIAYANNSIVKAFSDFKKEQESNSAELYAKKISELDYKNKRKFFEPFSGFRQKVLDKIDEIFVSKPERKKPSGALHEETFRKEEEFYQSYGGKEGVLKALELGKIRKVNGKIVKNGDMFRVDIFKHKKTNKFYGVPIYTMDFALKVLPNKAVARSKKGEIKDWILMDENYEFCFSLYKDSLILIQTKDMQEPEFVYYNAFTSSTVSLIVSKHDNKFETLSKNQKILFKNANEKEVIAKSIGIQNLKVFEKYIVSALGEVTKAEFRQREDFKNELR

SEQ ID NO: 380 - protein, 984 aa, Campylobacter jejuni
MARILAFDIGISSIGWAFSENDELKDCGVRIFTKVENPKTGESLALPRRLARSARKRLARRKVRLNHLKHLIANEFKLNYEDYQSFDESLAKAYKGSLISPYELRFRALNELLSKQDFARVILHIAKRRGYDDIKNSDDKEKGAILKAIKQNEEKLANYQSVGEYLYKEYFQKFKENSKEFTNVRNKKESYERCIAQSFLKDELKLIFKKQREFGFSFSKKFEEEVLSVAFYKRALKDFSHLVGNCSFFTDEKRAPKNSPLAFMFVALTRIINLLNNLKNTEGILYTKDDLNALLNEVLKNGTLTYKQTKKLLGLSDDYEFKGEKGTYFIEFKKYKEFIKALGEHNLSQDDLNEIAKDITLIKDEIKLKKALAKYDLNQNQIDSLSKLEFKDHLNISFKALKLITPLMLEGKKYDEACNELNLKVAINEDKKDFLPAFNETYYKDEVTNPVVLRAIKEYRKVLNALLKKYGKVHKINIELAREVGKNHSQRAKIEKEQNENYKAKKDAELECEKLGLKINSKNILKLRLFKEQKEFCAYSGEKIKISDLQDEKMLEIDHIYPYSRSFDDSYMNKVLVFTKQNQEKLNKTPFEAFGNDSAKWQKIEVLAKNLPTKKQKRILDKNYKDKEQKDFKDRNLNDTRYIARLVLNYTKDYLDFLPLSDDENTKLNDTQKGSKVHVEAKSGMLTSALRHTWGFSTKDRNNHLHHAIDAVIIAYANNSIVKAFSDFKKEQESNSAELYAKKISELDYKNKRKFFEPFSGFRQKVLDKIDEIFVSKPERKKPSGALHEETFRKEEEFYQSYGGKEGVLKALELGKIRKVNGKIVKNGDMFRVDIFKHKKTNKFYAVPIYTMDFALKVLPNKAVARSKKGEIKDWILMDENYEFCFSLYKDSLILIQTKDMQEPEFVYYNAFTSSTVSLIVSKHDNKFETLSKNQKILFKNANEKEVIAKSIGIQNLKVFEKYIVSALGEVTKAEFRQREDFKK

SEQ ID NO: 381 - protein, 721 aa, Campylobacter jejuni
MFVALTRIINLLNNLKNTEGILYTKDDLNTLLNEVLKNGTLTYKQTKKLLGLSDDYEFKGEKGTYFIEFKKYKEFIKALGDHSLSQDDLNEIAKDITLIKDEIKLKKALAKYDLNQNQIDSLSKLEFKDHLNISFKALKLITPLMLEGKKYDEACNELNLKVAINEDKKDFLPAFNETYYKDEVTNPVVLRAIKEYRKVLNALLKKYGKVHKINIELAREVGKNYSQRAKIEKEQNENYKAKKDAELECEKLGLKINSKNILKLRLFKEQKEFCAYSGEKIKISDLQDEKMLEIDHIYPYSRSFDDSYMNKVLVFTKQNQEKLNQTPFEAFGNDSAKWQKIEVLAKNLPTKKQKRILDKNYKDKEQKDFKDRNLNDTRYIARLVLNYTKDYLDFLPLSDDENTKLNNTQKGSKVYVEAKSGMLTSALRHTWGFSTKDRNNHLHHAIDAVIIAYANNSIVKAFSDFKKEQESNSAELYAKKISELDYKNKRKFFEPFSGFRQKVLDKIDEIFVSKPERKKPSGALHEETFRKEEEFYQSYGGKEGVLKALELGKIRKVNGKIVKNGDMFRVDIFKHKKTNKFYAVPIYTMDFALKVLPNKAVARSKKGEIKDWILMDENYEFCFSLYKDSLILIQTKDMQEPEFVYYNAFTSSTVSLIVSKHDNKFETLSKNQKILFKNANEKEVIAKSIGIQNLKVFEKYIVSALGEVTKAEFRQREDFKK

SEQ ID NO: 382 - protein, 512 aa, Campylobacter jejuni
MHKINIELAREVGKNHSQRAKIEKEQNENYKAKKDAEIECEKLGLKINSKNILKLRLFKEQKEFCAYSGEKIKLSDLQDEKMLEIDHIYPYSRSFDDSYMNKVLVFTKQNQEKLNKTPFEAFGNDSTKWQKIEVLAKNLPEKKQKRILDKNYKDKEQKDFKDRNLNDTRYIARLVLNYTKDYLDFLPLSDDENTKLNDTQKGSKVHVEAKSGMLTSALRHTWGFSAKDRNNHLHHAIDAAIIAYANNSIVKAFSDFKKEQESNSVELYAKKISELDYKNKRKFFEPFSGFRQKVLDKIDEIFVSKPERKKPSGALHEETFRKEEEFYQSYGGKEGVLKALELGKIRKVNGKIVKNGDMFRVDIFKHKKTNKFYAVPIYTMDFALKVLPNKAVARSKKGEIKDWILMDENYEFCFSLYKDSLILIQTKDMQEPELVYFNAFTSSTVSLIVSKHDNKFETLSKNQKILFKNANEKEVIAKSIGIQNLKVFEKYIVSALGEVTKAEFRQREDFKK

SEQ ID NO: 383 - protein, 965 aa, Campylobacter jejuni
MKIIGFNLGIANIGWALRENDEIIDCGVRVFDIPENPKNGNSLALERRENKARMKIVKRKKARMLATKTFLKKELNVDLSKLFLIGSTQSIYELRAKALSSLISKEELSAIILHIAKHRGYDDSALKNENGTIIEALNKNKETMLKFKSVGEYFYKNFVQNKEVKKIRNTTEDYSNSVPRSLLKQELDLILDKQKELGLIKNADFKEKLFEIIFFKRPLKDFSNKIGNCIFFENEKRAAKNTISACEFVALGKVVNLLKSIEKDIGIVYEKDSINEIMSIILDKTSISYKKIRDILNLPQEINFKGLDYSKNNVENSKLVDLKKLNEFKKALGDGFANLDKDILDSIATDITLTKDTATLKEKLKNYNVLNAEQIEKLSELVFNDHINLSLKALKQIIPLMYEGKRYDEACELCNFTIAKNQEKSEYLPLFEKTRFAKDISSPVVIRAICEFRKLLNDIIRRYGSVHKIHLELTRDFGISFSDRKKIIKEIEQNEQSRIKALETIKELKLEETSKNIQIVRLFEDQKGICPYSGLKMDLNRLDELVIDYIRPYNRSLDDSYSNKVLTFKKLSDLKQGKTPFEAFGEDEKLWAEINERIKEYNGKKRFKIFDKFFKDKKPFDFTEQTLQDTRWLTKLVASYLNEYLSFLPISEDENTALGYGEKGSKQHVILSSGMITQMLRNFWYLGFKNHKDYKNNAMDAIIVAFTTNSIIFAFNNFKKELDLAKAEFYANKISESDYLLKRKFLPPFSGFKEQALEKVKNIFVSHSLKIKNKGTLHDLTPLKIKELKNTYGDLDLAVKLGKIRKYNDKYYANANGSLVRADLFVDKKNKFHAVSIYKADFSTKKLPNKTPATTSNGETKEGIEMNENYNFCMSLYKNTPISVKIKGMKEPIICYYHGFNTSGSKITYKKHDNNYHNLSEDEMVVFRKNDKESIAVGKILEIKKYSISPSGELSLIENEERKWF

SEQ ID NO: 384 - protein, 759 aa, Campylobacter jejuni
MLSVAFYKRALKDFSHLVGNCSFFTDEKRAPKNSPLAFMFVALTRIINLLNNLKNTEGILYTKDDLNALLNEVLKNGTLTYKQTKKLLGLSDDYEFKGEKGTYFIEFKKYKEFIKALGEHNLSQDDLNEIAKDITLIKDEIKLKKALAKYDLNQNQIDSLSKLEFKDHLNISFKALKLITPLMLEGKKYDEACNELNLKVAINEDKKDFLPAFNETYYKDEVTNPVVLRAIKEYRKVLNALLKKYGKVHKINIELAREVGKNHSQRAKIEKEQNENYKAKKDAELECEKLGLKINSKNILKLRLFKEQKEFCAYSGEKIKISDLQDEKMLEIDHIYPYSRSFDDSYMNKVLVFTKQNQEKLNKTPFEAFGNDSAKWQKIEVLAKNLPTKKQKRILDKNYKDKEQKDFKDRNLNDTRYIARLVLNYTKDYLDFLPLSDDENTKLNDTQKGSKVHVEAKSGMLTSALRHTWGFSTKDRNNHLHHAIDAVIIAYANNSIVKAFSDFKKEQESNSAELYAKKISELDYKNKRKFFESFSGFRQKVLDKIDEIFVSKPERKKPSGALHEETFRKEEEFYQSYGGKEGVLKALELGKIRKVNGKIVKNGDMFRVDIFKHKKTNKFYAVPIYTMDFALKVLPNKAVARSKKGEIKDWILMDENYEFCFSLYKDSLILIQTKDMQEPEFVYYNAFTSSTVSLIVSKHDNKFETLSKNQKILFKNANEKEVIAKSIGIQNLKVFEKYIVSALGEVTKAEFRQREDFKK

SEQ ID NO: 385 - protein, 984 aa, Campylobacter jejuni
MVRILAFDIGISSIGWAFSENDELKDCGVRIFTKVENPKTGESLALPRRLARSARKRLARRKARLNHLKHLIANEFKLNYEDYQSFDESLAKAYKGSLISPYELRFRALNELLSKQDFARVILHIAKRRGYDDIKNSDDKEKGAILKAIKQNEEKLANYQSVGEYLYKEYFQKFKENSKEFTNVRNKKESYERCIAQSFLKDELKLIFKKQREFGFSFSKKFEEEVLSVAFYKRALKDFSHLVGNCSFFTDEKRAPKNSPLAFMFVALTRIINLLNNLKNTEGILYTKDDLNALLNEVLKNGTLTYKQTKKLLGLSDDYEFKGEKGTYFIEFKKYKEFIKALGEHNLSQDDLNEIAKDITLIKDEIKLKKALAKYDLNQNQIDSLSKLEFKDHLNISFKALKLITPLMLEGKKYDEACNELNLKVAINEDKKDFLPAFNETYYKDEVTNPVVLRAIKEYRKVLNALLKKYGKVHKINIELAREVGKNHSQRAKIEKEQNENYKAKKDAELECEKLGLKINSKNILKLRLFKEQKEFCAYSGEKIKISDLQDEKMLEIDHIYPYSRSFDDSYMNKVLVFTKQNQEKLNKTPFEAFGNDSAKWQKIEVLAKNLPTKKQKRILDKNYKDKEQKDFKDRNLNDTRYIARLVLNYTKDYLDFLPLSDDENTKLNDTQKGSKVHVEAKSGMLTSALRHTWGFSTKDRNNHLHHAIDAVIIAYANNSIVKAFSDFKKEQESNSAELYAKKISELDYKNKRKFFEPFSGFRQKVLDKIDEIFVSKPERKKPSGALHEETFRKEEEFYQSYGGKEGVLKALELGKIRKVNGKIVKNGDMFRVDIFKHKKTNKFYAVPIYTMDFALKVLPNKAVARSKKGEIKDWILMDENYEFCFSLYKDSLILIQTKDMQEPEFVYYNAFTSSTVSLIVSKHDNKFETLSKNQKILFKNANEKEVIAKSIGIQNLKVFEKYIVSALGEVTKAEFRQREDFKK

SEQ ID NO: 386 - protein, 1003 aa, Campylobacter lari]
MRILGFDIGINSIGWAFVENDELKDCGVRIFTKAENPKNKESLALPRRNARSSRRRLKRRKARLIAIKRILAKELKLNYKDYVAADGELPKAYEGSLASVYELRYKALTQNLETKDLARVILHIAKHRGYMNKNEKKSNDAKKGKILSALKNNALKLENYQSVGEYFYKEFFQKYKKNTKNFIKIRNTKDNYNNCVLSSDLEKELKLILEKQKEFGYNYSEDFINEILKVAFFQRPLKDFSHLVGACTFFEEEKRACKNSYSAWEFVALTKIINEIKSLEKISGEIVPTQTINEVLNLILDKGSITYKKFRSCINLHESISFKSLKYDKENAENAKLIDFRKLVEFKKALGVHSLSRQELDQISTHITLIKDNVKLKTVLEKYNLSNEQINNLLEIEFNDYINLSFKALGMILPLMREGKRYDEACEIANLKPKTVDEKKDFLPAFCDSIFAHELSNPVVNRAISEYRKVLNALLKKYGKVHKIHLELARDVGLSKKAREKIEKEQKENQAVNAWALKECENIGLKASAKNILKLKLWKEQKEICIYSGNKISIEHLKDEKALEVDHIYPYSRSFDDSFINKVLVFTKENQEKLNKTPFEAFGKNIEKWSKIQTLAQNLPYKKKNKILDENFKDKQQEDFISRNLNDTRYIATLIAKYTKEYLNFLLLSENENANLKSGEKGSKIHVQTISGMLTSVLRHTWGFDKKDRNNHLHHALDAIIVAYSTNSIIKAFSDFRKNQELLKARFYAKELTSDNYKHQVKFFEPFKSFREKILSKIDEIFVSKPPRKRARRALHKDTFHSENKIIDKCSYNSKEGLQIALSCGRVRKIGTKYVENDTIVRVDIFKKQNKFYAIPIYAMDFALGILPNKIVITGKDKNNNPKQWQTIDESYEFCFSLYKNDLILLQKKNMQEPEFAYYNDFSISTSSICVEKHDNKFENLTSNQKLLFSNAKEGSVKVESLGIQNLKVFEKYIITPLGDKIKADFQPRENISLKTSKKYGLR

SEQ ID NO: 387 - protein, 372 aa, candidate division
DNESAINQIAYILTTQKADEGIRAELDSLPLSDKAKKAIVKIKPTNFKAFGHLSIKALQKITPHILEGMTYDKACEAAGYDFKKQSASLEQITNPVVKRAITQTLKVVRAIERKYGKPYFIKVETARDLAKNFKDRNAIKKENEENQGYNEDIKSIITNGYEASPKTKGGKQLLNHLKEFNVRLNKNADFNGQQIIKVKLYREQQGKCLYSGNPIDFETMLRDDNAYQVDHIVPFSRSNNDGITNKVLVFTEENQKKADRTPFEYFGTDERRWEKFVALVETTYKTRDVKTSDKATNAINYEYNGYAMKKKQNLLLQDYKNDSWNVRALNDTRYITRFIQNYLRQNVDFAEGEEKQRIIAPNGTTTAYLRKR

SEQ ID NO: 388 - protein, 1117 aa, Capnocytophaga ochracea
MKHILGLDLGSNSIGWAFVQQDFENKQGKIIATGSRIIPMDQGILGDFERGNTVSQTAERTTYRSMRRLRERHLLRRERLHRVLHLLGFLPPHYDAQIDFTKRYGKFIDNAEPKIAYNNGNFIFMNSFNEMVEDFKKHQPQLFYKKSNGEESRIPYDWTIYYLRKKALSQKITQQELAWLILHFNQKRGYYQLRGEEETENPNKEVAFHSLKVVDVEAEAPNKKGEIWYTIRLENGWIYRRTSKNPLDDWKGKTRDFIVTTDLNDDGTIKLDKEGKEKRSFRAPDENDWNLLKKKTEHDIDFSGKPVGTYIYDHLLQNPNQKIKGKLVRTIERKYYKDELKAILAKQIALQPELFTETLLADCIRELYRKNETQQQNLLSKDFLHLFVEDIIFYQRPLCSKKSTIANCTLEKRSYIDKETNERKDAPIKVCAKSNPYYQEFRVLQWLQNLRIYEIETDREVTAEFIETPQDYEALFNFLMSQKEIDNEGLLKYFLFAKNPQIKDKAAKSELKKWLTTYRWNYVYDAADNSSKKYPMNETGYELQRYLQKVEGLPANFLTFDITYQLWHLLYSVKDKVEFEKALKKFAKKKQLDKTSFVDSFKNFKPYPNEYGSFSEKAIKKLLPLMRFGNHWDFNRIDVSTQKRIDDLINGVANEDIRTIIREKAEKYQLNSETCFQDLPLWLAQYVVYNRHAEATDIEKWTSVSDLEAYLEDFKQHSLRNPIVEQVVTETLRVVRDIWQQYSGGQANFFDEIHIELGRELKKTAEERKQLSDKNQENENTNLRIKKLLAELKEDASIQNVRPYSLVQQELLKIYEEGVFSSTDEIEEDIQKIRKKVEPTPPEIQRYKLWLEQKYKSPYTGEVISLTKLFTEEYEIEHIIPQSRYYDDSLSNKVICESAVNKLKTNQLGLEFIQNHHGEKVRITANKEVTIFTEEQYKEFVKKHYANNSAKQQKLLLNEIPEKMVARQLNDTRYISKCISEILSKIVRSDEKDEGVNSKNIIPCTGKITTALKQDWGLNDVWNELILPRFERMNQLTQTQLFTSYNDRLQKNLPTVPIEYSQGFQKKRIDHRHHAMDALVIACATREHINYMNNQHALDKSKDKKEKQQSRIDLHPL

SEQ ID NO: 389 - protein, 303 aa, Capnocytophaga ochracea
MSFKQNLRVINKATNYYEKWEEKNGVLVKKKVKQEGTNWAIRKPLHKETVSGKIVLDRKIGKDKILTATRKAVDITFTEKIISSITDTGIQKILLNYLKYKGSPEVAFSAEGLEELNKNIAQYNDGKKHQPIYKVRIFEEGSKFPLGETGAKATKYVEAAKGTNLFFGVYQGKEKRTYATIPLNEVIERQKQGLPSVPERNEKGEPLLFSLSPNDLVYVPMEGEIAETIDFNNLSKEQKERIYKTVSFTGNQCFFVQEAVASPIVNKMEYSPLNKMERDILGIMIKEVCVKLKVDRLGNIIKA

SEQ ID NO: 390 - protein, 1471 aa, Capnocytophaga sp.
MCKYFYIKNFITFVLSKSIIPMKHILGLDLGSNSIGWAFVQQDFENKQGKIIATGSRIIPMDQGILGDFERGNTVSQTAERTTYRSTRRLRERHLLRRERLHRVLHILGFLPPHYDAQIDFTKRYGKFIDNAEPKIAYNNGNFIFMNSFNEMIEDFKKHQPQLFYKKSNGEESKIPYDWTIYYLRKKALSQKITQQELAWLILHFNQKRGYYQLRGEEETENPNKEVAFHSLKVVDVEAEAPNKKGEIWYTIRLENGWIYRRTSKIPLDDWKGKTRDFIVTTDLNDDGTIKVDKEGKEKRSFRAPDENDWNLLKKKTEHDIDFSGKTVGAYIYDHLLQNPNQKIKGKLVRTIERKYYKDELKAILAKQIALQPELFTETLLADCIRELYRKNETQQQNLLSKDFLHLFVEDIIFYQRPLRSKKSTIANCTLEKRSYIDKETNERKDAPIKVCAKSNPYYQEFRVLQWLQNLRIYEIETDREVTAEFIETPQDCEALFNFLMSQKEIDNKGLLKYFLFAKNPQIKDKAAKSELKKWLTTYRWNYVYDAADNSSKKYPMNETGYELQRYLQKVEGLPANFLTFDITYQLWHLLYSVKDKVEFEKALKKFAKKKQLDKTSFVDSFKNFKPYPNEYGSFSEKAIKKLLPLMRFGNHWDFNRIDVSTQKRIDDLINGVANEDIRTIIREKAEKYQLNSETCFQDLPLWLAQYVVYNRHAEATDIEKWTSVSDLEAYLEDFKQHSLRNPIVEQVVTETLRVVRDIWQQYGGGQANFFDEIHIELGRELKKTAEERKQLSDKNQENESTNLRIKKLLAELKEDASIQNVRPYSLVQQELLKIYEEGVFSATDEVEEDIQKIRKKAEPSKADLQRYKLWLEQKYKSPYTGEVISLTKLFTEEYEIEHIIPQSRYYDDSLSNKVICESAVNKLKTNQLGLEFIQNHHGEKVRITANKEVTIFTEEQYKEFVKKHYANNSAKQQKLLLNEIPEKMVARQLNDTRYISKYISEILSKIVRSDEKDEGVNSKNIIPCTGKITTALKQDWGLNDVWNKLILPRFERMNQLTQTQLFTSYNDRLQKNLPTVPIEYSQGFQKKRIDHRHHAMDALVIACATREHINYMNNQHALDKSKDKKEKQQSRIDLRTILCEKKNNNWQFKKPWSTFTQEAKEALEHIVVSFKQNLRVINKATNYYEKWEEKNGVLVKKKVKQEGTNWAIRKPLHKETVSGKIVLDRKIGKDKILTATRKAVDITFTEKIISSITDTGIQKILLNYLKYKGSPEVAFSTEGLEELNKNIAQYNNGKKHQPIYKVRIFEEGSKFPLGETGAKATKYVEAAKGTNLFFGVYQGKGKRTYATIPLNEVIERQKQGLPSVPERNEKGEPLLFSLSPNDLVYVPMEGEIAETIDFNNLSKEQKERIYKTVSFTGNQCFFVQEAVATPIVNKMEYSPLNKMERDILGTMIKEVCIKLKVDRLGNITKA

SEQ ID NO: 391 - protein, 1450 aa, Capnocytophaga sp.
MKHILGLDLGSNSIGWAFVQQDFENKQGKIIATGSRIIPMDQGILGDFERGNTVSQTAERTTYRNTRRLRERHLLRRERLHRVLHILGFLPPHYDSQIDFTKRYGKFIDNAEPKIAYNNGNFIFMNSFNEMIEDFKKYQPQLFYKKSNGEESKIPYDWTIYYLRKKALSQKITQQELAWLILHFNQKRGYYQLRGEEETENPNKEVAFHSLEVVDVEAEAPNKKGEIWYTIRLENGWIYRRTSKIPLDDWKGKTRDFIVTTDLNDDGTIKLDKEGKEKRSFRAPDENDWNLLKKKTEHDIDFSGKTVGAYIYDHLLQNPNQKIKGKLVRTIERKYYKDELKAILAKQIALQPELFTETLLADCIRELYRKNETQQQNLLSKDFLHLFVEDIIFYQRPLRSKKSTIANCTLEKRSYIDKETNERKDTPIKVCAKSNPYYQEFRVLQWLQNLRIYEIETDREVTAEFIETAQDNEALFNFLMSQKEIDNESLLKYFLFAKNPQIKDKVAKSELKKWLTTYRWNYVYDAADNSSKKYPMNETGYELQQYLQKVEGLPANFLTFDITYRLWHLLYSVKDKVEFEKALKKFAQEYQLDEASFVDSFKNFKPYPNEYGSFSEKAIKKLLPLMRFGNHWDFNRIDVSTQKRIDDLINGVANDEIRTIIREKAEKYQLNSETCFQGLPLWLAQYVVYNRHAEAADIEKWTSVNDLEAYLEDFKQHSLRNPIVEQVITETLRVVRDIWQRYGGGQANFFDEIHIELGRELKKTAEERKQLSNRNQENENTNLRIKKLLAELKEDASIQNVRPYSPVQQELLKIYEEGVFSATDEVEEDIQKIRKKAEPTTPEIQRYKLWLEQKYKSPYTGEVISLTKLFTEEYEIEHIIPQSRYYDDSLSNKVICESAVNKLKTNQLGLEFIQNHHGEKVRITANKEVTIFTEEQYKEFVKKHYANNSAKQQKLLLNEIPEKMVARQLNDTRYISKYISEILSKIVRSDEKDEGVNSKNIIPCTGKITTALKQDWGLNDVWNELILPRFERMNQLTQTQLFTSYNDRFQKNLPTVPIEYSQGFQKKRIDHRHHAMDALVIACATREHINYMNNQHALDKSKDKKEKQQSRIDLRTILCEKKNNNWQFKKPWSTFTQEAQEALEHIVVSFKQNLRVINKATNYYEKWEEKNGVLVKKKVKQEGTNWAIRKPLHKETVSGKIVLDRKIGKDKILTATRKSVDITFTEKIISSITDTGIQKILLNYLKYKGSPEVAFSAEGLEELNKNIAQYNDGKKHQPIYKVRIFEEGSKFPLGETGAKATKYVEAAKGTNLFFGVYQGKGKRTYATIPLNEVIERQKQGLPSVPERNEKGEPLLFSLSPNDLVYVPMEGEIAETIDFNNLSKEQKERIYKTVSFTGNQCFFVQEAVATPIVNKIEYSPLNKMERDILGTMIKEVCIKLKVDRLGNITKA

SEQ ID NO: 392 - protein, 1435 aa, Capnocytophaga sp.
MKNILGLDLGTTSIGFAHIVEDENKEKSEIKELGVRIVSLATDEQSDFEKGKSISTNANRTLKHGARLNLDRYQQRRKFLIDLLQKANLITSASILAENGKNTTHSTWQLRAKAVTERIEKEEFARVLLAINKKRGYKNSRKTKTEDEGQAIDGMAIAKCLYDENLTPGQLSLQLLQQNKKLLPDFYRSDLQKEFDLVWNLQKQFYPDILTDSFYKELQGKGKDATSKAFSKRYHFDTAENKGSKESVRLQAYQWRAEAISKQLSKEEVAYVLTEINNNLNNSSGYLGAISDRSKELYFNRQTVGQYLYAQLQENRHNSLKNKVFYRQDYLDEFERIWETQASFHKELTDELKKQIRDVVIFYQRKLKSQKGLVSFCEFESKEIEIEKDGKAITKSIGARVVPKSSPLFQEFKIWQILNNVTCKRKGIRKKKSSAKSTELDLFNEPSQSIFSLDMECKQLLFDELNLKGDLKSDKVLKLLGYSPQEWEINYNQLEGNRTQKSLYEAYLKIIEIEGYEVKDILQIKSTKDDWSLDESPLSASEIRERVKVIFQTLGICTKILYFDPLLPVKEFEQQYSYQLWHLLYSYESDDSTSGNETLYRILEKKYAFKREHATILANVALQDDYGSLSTKAIRKIYPYIKENQYSTACELAGYKHSKLSLTTEELEARELKNIIPLLKKNALRNPVVEKILNQMINVVNALIEKNSERDAEGKITKYFHFDEIRIELARELKKNAQERYEMTQNINKAKLEHQKISEKLQKQFGIKNPTKSDIIRYRLYQELEHNGYKELYTNTYIAPDVLFSKNIDIEHIVPKARVFDDSFSNKTLAFKEFNIKKGESTAFDYITSLNCEGELNQYLTRVENAYKTKSISLTKYKNLLKKASEIGDGFINRDLRDTQYIAKKAKEILFQVTKNVLSTSGSITDRLREDWGLVDVMKELNMPKYQSLGLTEVEERKDGNKVTVIKDWTKRNDHRHHAMDALTVAFTKPSYIQYLNHLNARKDENNKNYSVILAIEKKETIKVPINNGKNKRVFIEPILNFRQVAKKHLEEIFISHKAKNKVVTKNINKPAGTDKQQITLTPRGQLHKETIYGKYQYYVNKEEKVGVKFDERTITKVSNPLYREALLKRLQANDNDPKKAFAGKNALSKNPIYLDEAKTKTLPEKVNLTYLEEDFSIRKDISPDNFKDLKSIEKVIDQGVKRILIKRLQAYDNDPKKAFVDLEKNPIWLNKEKGIAIKRVTISGVSNAQPLHIGKDHLGKTTLNKEGKEVPVDYVSTGNNHHVAIYRDKEGNLQEQIVSFFEAVVRAQQGLPIIDKNYKQAEGWQFMFTMKQNEMFVFPNEATGFNPAEIDLLDPKNKKLISPNLFRVQTISIVKYGNSVVRDFKFRHHLETTLQDDKILQGITFQQIKSLEPLRNIVKVRINHLGDIVNIGEY

SEQ ID NO: 393 - protein, 1432 aa, Capnocytophaga sp.
MKNILGLDLGTTSIGFAHIVEDENKEKSEIKELGVRIVSLTTDEQSDFEKGKSITTNANRTLKHGARLNLDRYQQRRKYLIDLLHKANLITPSSILAENGKNTTHSTWQLRAKAVTERIEKEEFARILLAINKKRGYKSSRKAKTEDEGQAIDGMAIAKRLYDENLTPGQLSLQLLQQNKKLLPDFYRSDLQKEFDLVWNFQKQFYPDILTDIFYKELQGKGKDATSKAFSKRYHFDTAENKGSKESVRLQAYQWRAEAVSKQLSKEEVAYVLTEINNNLNNASGYLGAISDRSKELYFNRQTVGQYLYAQLQENRHNSLKNKVFYRQDYLDEFERIWETQALFHKELTDELKKQIRDVVIFYQRKPKSQKGLISFCEFESKEIEIEKDGKTITKNIGARVVPKSSPLFQEFKIWQILNNVICKRKGIRKKKISAKTTQLDLLNESSQTIFSLDMECKQLLFDELNLKGDLKSDKVLKLLGYSPQEWEINYNQLEGNRTQKALYEAYLKIVEMEAHDVKDILQIKSTKDDWSLDESPLSASEIRESVKAIFQALGICTKILYFDPLLPVKDFEEQDSYQLWHLLYSYESDDSTSGNETLYRILEKKYAFKREHARILANVALQDDYGSLSTKAIRKIYPNIKENQYSTACEMAGYKHSKLSLTTEELEARELKNIIPLLKKNALRNPVVEKILNQMINVVNALIEKNSERDAEGKITKYFHFDEIRIELARELKKNAQKRYEMTQNINKAKSEHQKISEILQKEFGIKNPTKSDIIRYRLYKELEHNGYKELYTNTYIAPDVLFSKNIDIEHIVPKARVFDDSFSNKTLAFKDFNIKKGESTAFDYITSLKNEEKLNQYLARVENAYKTKNISPAKYKNLLKKASEIGDGFINRDLRDTQYIAKKAKEILFQVTKNVLSTSGSITDRLREDWSLVDVMKELNMPKYQSLGLTEVEERKDGNKVTVIKDWTKRNDHRHHAMDALTVAFTKPSYIQYLNHLNARKDENNKNYSVILAIEKKETIKVPTNNGKNKRVFIEPIPNFRQVAKKHLEEIFISHKAKNKVVTKNTNKPAGTNKQQITLTPRGQLHKETIYGKYQYYVNKEEKVGVKFDKETIAKVSNPLYREALLKRLQANDNDPKKAFTGKNALSKNPIYLDEAKTKTLPEKVNLTYLEEDFSVRKKIVPKNPTSKEFVPNLKSIEKVVDEGVRNILIERLRVYNNDPEKAFVDLEKNPIWLNKEKGIAIKRVTISGVNNAQPLHIGKDHLGKTTLNKEGKEIPVDYVSTGNNHHVAIYRDKEGNLQEQIVSFFEAVVRTQQGLPIIDKTYKQEEGWQFLFTMKQNEMFVFPNEATGFNPAEIDLLDPKNKKQISPNLFRVQKIATKDYFFRHHLETNVETDNVLKNTTWKREGLSGLKDIVKVRINHLGDIVSIGEY

SEQ ID NO: 394 - protein, 1426 aa, Capnocytophaga sp.
MKNILGLDLGTTSIGFTHIVEDENKEKSEIKELGVRIVSLTTDEQSDFEKGKSISTNANRTLKHGARLNLDRYQQRRKFLIDLLQKANLITSSSILAENGKNTTHSTWQLRAKAVTERIEKEEFARVLLAINKKRGYKSSRKAKTEDEGQAIDGMAIAKRLYDENLTPGQLSLQLLQQNKKLLPDFYRSDLQKEFDLVWNFQKQFYPDILTDSFYKELQGKGKDATSKAFSKRYHFDTAENKGSRESVRLQAYQWRAEAISKQLSKEEVAYVLTEINNNLNNASGYLGAISDRSKELYFNRQTVGQYLYAQLQENKHNSLKNKVFYRQDYLDEFERIWETQASFHKELTEELKKQIRDVVIFYQRKLKSQKGLISFCEFESKEIEIEKDGKTITKSIGARVVPKSSPLFQEFKIWQILNNVTCKRKGIRKKKSSAKSTELDLFNEPSQTIFSLDMECKQLLFEELNLKGDLKSDKVLKLLGYSPQEWEINYNQLEGNRTQKALYEAYLKIVEMEAHDVKDILQIKSTKDDWALEESPLSASEIRERVKAIFQTLGICTKILYFDPLLPVKEFEEQDSYQLWHLLYSYESDDSTSGNETLYRILEKKYAFKREHATILANVTLQDDYGSLSTKAIRKIYPYIKENQYSTACEKAGYKHSKLSLTTEELEARELKNIIPLLKKNALRNPVVEKILNQMINVVNALIEKNSERDAEGKITKYFHFDEIRIELARELKKNAQERYEMTQNINKAKLEHQKISGILQKEFGIKNPTKSDITRYRLYQELAHNGYNDLYTNTYIPKELLFSKNIDIEHIVSKARVFDDSFSNKTLAFREFNIKKGESTAFDYITSLNNEEELNQYLNRVENAYKTKNISPAKYKNLLKKASEIGDGFINRDLRDTQYIAKKAKEILFQVTKNVLSTSGSITDRLREDWGLVDVMKELNMPKYQSLGLTEVEERKEGNKVTVIKNWTKRNDHRHHAMDALTVAFTKPSYIQYLNHLNARKDKNNKNYSVILAIEEKETIKVPTNNGKNKRVFIEPIPNFRQVAKKHLEEIFISHKAKNKVVTKNTNKPAGTDKQQITLTPRGQLHKETVYGKYQYYVNKEEKIGVKFDKETIAKVSNPVYREALLKRLQANDNDPKKAFAGKNALSKNPIYLDEAKTKTLTEKVNLTYLEEDFSIRKDISPDNFKDLKSIEKVIDQGVKRILIKRLQDYDNDPKKAFVDLEKNPIWLNKEKGIAIKRVTISGVNNAQPLHIGKDHLGKTTLNKEGKEIPVDYVSTGNNHHVAIYRDKEGNLQEQIVSFFEAVVGAQQGLPIVDKTYKQAEGWQFLFTMKQNEMFVFPNEATGFNPAEIDLLDPKNKKQISPNLFRVQKIATKDYFFRHHLETNVDTDNVLKNTTWKREGLSGLKDIVKVRINHLGDIVSIGEY

SEQ ID NO: 395 - protein, 1450 aa, Capnocytophaga sp.
MKRILGLDLGSNSIGWAFVEQDFENKQGKIIATGSRIIPMDQGILGDFEKGNTVSQTAERTTYRSMRRLRERHLLRRERLHRVLHILGFLPPHYDAQIDFTKRYGKFIDNAEPKIAYNNGNFIFMNSFNEMIEDFKKYQPQLFYKKSNGEESKIPYDWTIYYLRKKVLSQKITQQELAWLILHFNQKRGYYQLRGEEETENPNKEVAFHSLKVVDVEAEAPNKKGEIWYTIRLENGWIYRRTSKIPLDDWKGKTRDFIVTTDLNDDGTIKVDKEGKEKRSFRAPDENDWNLLKKKTEHDIDFSGKTVGAYIYDHLLQNPNQKIKGKLVRTIERKYYKDELKAILAKQIALQPELFTETLLADCIRELYRKNETQQQNLLSKDFLHLFVEDIIFYQRPLRSKKSTIANCTLEKRSYIDKETNERKDTFIKVCAKSNPYYQEFRVLQWLQNLRIYEIETDREVTAEFIETAEDYEALFNFLMSQKEIDNEGLLKYFLFAKNPQIKDKVAKSELKKWLTTYRWNYVYDAADNSSKKYPMNETGYDLQRYLQKVEGLPANFLTFDITYRLWHLLYSVKDKVEFEKALKKFAQEYQLDEASFVDSFKNFKPYPNEYGSFSEKAIKKLLPLMRFGNHWDFNRIDVSTQKRIDDLINGVANDEIRTIIREKAEKYQLNSESCFQGLPLWLAQYVVYNRHAEATDIEKWTSVSDLETYLEDFKQHSLRNPIVEQVVTETLRVVRDIWQQYGGGQANFFDEIHIELGRELKKTAEERKQLSNRNQENENTNLRIKKLLAELKEDASIQNVRPYSPVQQELLKIYEEGVFSSTDQVEEDIQKIRKKAEPTTPEIQRYKLWLEQKYKSPYTGEVISLTKLFTEEYEIEHIIPQSRYYDDSLSNKVICESAVNKLKTNQLGLEFIQNHHGEKVRITGNKEVTIFTEEQYKEFVKKHYANNSAKQQKLLLNEIPEKMVARQLNDTRYISKYISEILSKIVRSDEKDEGVNSKNVIPCTGKITTALKQDWGLNDVWNELILPRFERMNQLTQTQLFTSYNDRFQKNLPTVPIEYSQGFQKKRIDHRHHAMDALVIACATREHINYMNNQHALDKNKDKKEKQQSRIDLRTILCEKKNNNWQFKKPWSTFTQETKEALEHIVVSFKQNLRVINKATNYYEKWEEKNGVLVKKKVKQEGTNWAIRKPLHKETVSGKIVLDRKIGKDKILTATRKEVDITFTEKIISSITDTGIQKILLNYLNYKGSPEVAFSAEGLEELNKNIAQYNDGKKHQPIYKVRIFEEGSKFPLGETGAKATKFVEAAKGTNLFFGVYQGKEKRSYATIPLNEVIERQKQGLPSVPERNEKGEPLLFSLSPNDLVYVPMEGEIAETIDFNNLSKEQKERIYKTVSFTGNQCFFVQEAVATPIVNKMEYSPLNKMERDILGTMIKEVCIKLKVDRLGNITKA

SEQ ID NO: 396 - protein, 1437 aa, Capnocytophaga sp.
MKYIKYILGLDIGSNSIGWALIQLDLLQKTKRIIATGSRIIPMDQKVLSDFGKGITISPTAQRTSYRNARHCRERHLLRRERLHRVLHILGFLPTHYDKQIDFSKRYGKFVDNTEPKIAYNERKFLFMDSFQEMLADFKIHQPDLFYTKKNGEESKIPYDWTIYYLRKKALSRKISKEELAWIILNFNQKRGYYQLREEEEENKENDFEIISSKIISVIKKDKDKKYNKYWYDIILENGLVYQAAFYNDFVYNWINQDREFIIERISLKNGTEKVKLSYLPTFDEIDKMDKKEQDKYYKKIKIKTENSIGNKTVGCYIYDHILQNPNEKIKGKLVRTIERKYYKEELKAILEKQVALQPELFTDQLFADCIRELYSKNEAQQRNLAARDFVHLFVEDIIFYQRSLRRQKSTLANCSLESRSYIDKDSHTRKEAPLKVCPKSNPYYQEFRVLQWLQNLKIYEIDTDQEVTHEFIKTLEDKQQFFDFLMNQKEIDCEELLKYFLNQTYPNAREKALKSELKKWKDTYRWNYVYDIGEKSSKKYPMNETRYELKRHLEKVANLPDDFLSSEVEYLLWHLIYSVKDKVAYEKGLKTFAQKHHLDKDSFVESFKKFKPYPSEYGSFSEKAIRKLLPLMRFGSYWDFNHIDKNTQKRIEDLITGVENEEIRTILREKAEKYQLEKETDFQDLPLWLAQYIVYNRHAEASSLEKWTSVNDLETYLNEFKQYSLRNPIVEQVVMETLRVVRDIWQQYGQGQASFFDEIHIELGRELKKTAKEREKLSKQNQKNEDINLSIKEKLKELEKYNTRAYSITHQEKYKLWLEQKHISPYTGQIISPENLFTDNYEIEHIIPQSRFFDDSLSNKVVCESIVNKAPYKDRQLGLEFIKNQGGRIVKELSTENKTIKIFTEEQYRTFIKEHYSNNPEKTKKLLLEEIPEKMVARQMNDTCYISKFISEILSKIVRSDEQDEGVHSKNVILCTGKITSALKQDWGVNDVWNDLILPRFERMNDLTQSTLFTTYNEKYQKYLPTVPMEYSNGFQKKRIDHRHHAMDAIIIACATREHINYINNQHALEKGKDKKEKQKEHDKLREKLCIKKDNKGSEENYSWIFKKPWDTFTQEVQAALEGIVVSFKQNLRVINKATNYYERWVEENGKYIKKMVKQEGTNWAIRKPLHEETISGKIYLDREEITKNDILTATRKTVDSSFDEKRIKKITDTGIQKILLNYLKYKGSPEIAFSPEGLEELNKNLSIYNDGKPHKPIYKVRIYEKGSGRFALGEKGRKYKKYVQGAPNLYFGIYQGANKRSFATIPLNEVIERQKQGRPSIPEYNEKGDPLLFSLSPNDLVYVPVEGEIIEDIDFQNLSKEQKERIYNVNDFSSTCYFTPNRIAKAIFPKEVDLQRKGDKLPGSYDTKTASLEGIQIKEVCIKLKIDRLGNISKA

SEQ ID NO: 397 - protein, 1140 aa, Catellicoccus marimammalium
MKNMTKVNVGLDVGISSAGWSVINAETNQILESGVRLFSGSDADENVNRRNQRQGRRLFRRRKLRIQEAKKYLENVFQLKDIEPKDEWNPYEIRVRALNEKVSKEELSIALLNIVKHRGISYELEDVTDEEGTNTQSFQSGLDYNRRLLKTKTVGEIQYDRLQKYGQVRGQIQTEDGLLINIFPTKNYVEEVERILETQKKYHPEIDDVFIEKIISFVTRKREYFVGPGNEKSRTDYGIYRENGETLDNLFEILIGKDKFYPEEYRAAGSSYTAQIFNLLNDLNNLRIPTTEDHHLTKAQKEEIITELKNTSRLSGGMLKLISKVTKAPKEEISGYRKDEKDKPDLHSLAYYRKQKNMLEKEGIQIADFSEELLDELATMMTLNTEPGEIRKQLNKITNQYDILTPEVIEVLVKNHTAFVATSNHKWHRFSLKLMKEFIPELLETSKEQSTILCERGFIQNRASYLDENHHFNYAELRENLYNPVVRKSTCEMLKVFTAIQEKYPNIQNVIVELPRETNEDEQKRKIKKINDNNAKRKKEILKEAQAQSGLSEEALEEKLLKTKGLYLKLMLWYEQEGKCVYSGQEIPLSDLLQNKGGYEVDHIIPISISFDDRLCNKVLVRQQLNSQKSNQTPFEYMTTHTDGHLSFHELKELVGKNKRFSKEKRELLLAEIYSNDIETRKRFINRNLVDTSYTARIVLNALQQYKKENQLSMNVSVVRGAMTNILRKKVKLDKTRETFHHHAIDASLMAVIPNIEFFKERKEWLPKSANEEVVEVEVSEEETMPEKEFKVKMRLPESFIQDVQILQRNSFAKEEVSGPQTRERNLKIKFSHQVDQKMNRKVADDTIYGTRQAQLGKDKKEETYVIGKIKDIYNYDEYVRFKKRYDKNKESFLMYHHDPQTFEKLEEILAQYPEYIEDEKGKKKKVSPFALYREENGPVTKYAKKNNGPVIKQLKYYDSKLNRKIDISHKYSTKNRQVVLQSLKPYRTDVYRNQDTGEYTLVGIDQNDGKFVNGHYGIPKSRYEEIKANNKLSEHDEFVFSLYKNSMVKVIDENGESIVVRYLSRSMPNRKNNAEIKPVEKYQFEDGEVVPVYGKCRKQMQTVFVKKGWTLLKGNTDILGNTYFVEKESENPKKMIDDK

SEQ ID NO: 398 - protein, 1419 aa, Chryseobacterium sp.
MMIKNILGLDLGTNSIGWALIKQNFENKYGEILGMGSRIIPMSQDVLGEFGKGNSVSQTAARTGYRGVRRLRERFLLRRERLHRVLNVLNFLPEHYASQIDFEKRFGKFKYETEPKLAYNNDGFFFKNSFDEMLGDFKDHQFHLLENGRKVPYDWTIYYLRKKALSQKIEKEELAWILLNFNQKRGYYQLRGEDFEEEKDRVFVRLKVDRVVDSGENIKGKILYDVYFENGWKYEKQIVKTEDWIGRTKEFIVTESILKNGDTKRTFKAVDSEKDWIAIKTKTEQEIDKSHKTVGAYIYEALLQNPKQKIKGKLVRTIERKFYREELKKILERQKEFHPELQSDDLYNDCIRELYRNNEAHQITLSKKDFVHLLLNDLIFYQRPLRSQKSSVSNCTLEFRKYKDENGVEHAQYLKTIPKSNPYYQEFRVWQWMFNLNIYRKDDDTNVTKEFLSSTEDYETLFEFLNNRKEVDQKALLRHFKLNEKTHRWNYVEDKKYPCNETKTMISTRLEKVENYPSDFLTREMEQNIWHIIYSVNDKIEYEKALKSFAHKNNLDENSFFEAFKKFPPFKSEYGSFSEKAIKKLLPLLRLGKYWNWESIDRKSQGRIEKIITGEFDGNIKDKVREKAIHLTAENDFQGLQLWLAQYIVYGRHSEASMIGKWNSADDLEEFLKGFKQHSLRNPIVEQVITETLRVVKDIWLKYGNGAKDFFSEIHIELGREMKQTKDERVDATKRITENENTNLRIKALLAEMMNDNSVENIRPYSPMQQEILKIYEDGILKSDIEIDDDILKISKTAQPSSSDLKRYKLWLEQRYKSPYTGQIIPLNKLFTSEYEIEHIIPQSRYFDDSFSNKIICESAVNKLKDNYIGLGFIKQFGGMIVECGFGKSVEIFKAEEYEDFVKKHYANNRSKRNKLLLEEIPEKMIDRQLNDTRHISKYISGVLSNIVRQEDGTDEGVNSKNIVPGNGKITTQLKQDWGLNDVWNELILPRFERMNQLTNSTDFTSWNKNHQKFLPTVPIEFSKGFSKKRIDHRHHAMDALVIACATKDHINLLNNQSAKSDTKRYDLKRKLMKFERVVYSHSKTGEKIEKEVPKQFLKPWDNFTVDAKNKMETIIVSFKQNLRVINKATNHYEKWIEKDGIKRKELIKQEGTNWAIRKPMHKETVSGKVDLPGIKIPKGKILTATRKSLDTSFDLKTINSITDTGIQKILKNYLEFKGSSELAFSPEGIEDMNKNIEKFNDGKPHQSINKVRIFELGSKFSVGQTGNKKDKYVEAAKGTNLFFAVYEDKNGKRSYETIPLNEVIERQKQGLDSVSFKNKEDFLLCPNDLVYVPSEDELENIYNIDFKNLTTEKTGNIYKVVSFSGNQIFFIRQDIAISIVNKAEFSTLNKMERAIDGSMIKENCIKLKIDRLGNIAKI

SEQ ID NO: 399 - protein, 1065 aa, Clostridium perfringens
MNKDINYALGLDIGITSVGWAVINLDLNRIEDLGVRIFNAAENPKDGSSLALPRRLARGRRRLLRRKAYRVERVRKLIVKNNILTKEELEGLFKNKEVIDVWEARVKGLDYKLSREEWAKILINFCKRRGFKSNRKNETKDKEAGQILSSISYNIEKMKETNSRTIGEYIYNEVKNSDDSYAPLRNKFGEYKMCVSRDVLREEIHTLFEKQRELGNNFASDEIEDKYFEIFNSQRPFSNFEDLEKLVGFCTFERKKHKRAPKHCISSEEFTLYEGINKLSIIKDGEKRKLSEEERTLVVNEAFNKKEIKYTTLRKLLGLSEDELFSTLTYSIDKDISKTENTKFVSLKGYHEIKRAIEKGVSKKAWQDIENNRNLLNDIAYVLTLGKTDDEIEKQLRLRNVPEELFESLLDMSFSKFNNLSIYALEKILPFMKEGYQYNEACEKAGYNFKAIYEGVRTKKLPVIEIDEIVNPVVNRALAQTRKVINSVIDKYGSPVRINIELARDLAKNFKDRKLIEKEQKENRANLDKIRENLRELMDKEPTAVEVLKYRLWEQQRGECAYTQSQIALERLFSPGYCEIDHIIPFSRSFDDSLSNKILVLGSENQRKGNKIPYEYFGEDSERWNSFEIWVKGSYLNYKKKANLLKKKFTEEEQRDWKARNLQDTKYICRYISNFVNNRLEFKESENKQKVITVNGRATAYLRSRWGLNKVREDGDKHHALDAAVVGVTTQGMVQKISKYSKAHELYTVRKNDEFVDVETGECVDVDEYKEIRKDILPRPWRGFSEELKLRLSDNPLEELKKLPIETYNEEFIKENVKPIFVSRVPFRKISGKLFKETIYSERAFKDGYFVSKKSLVDLKRGDLDNFYNYECDKKLYDAISERMKEFNYNGKKAFESPFRKPTKSGKEGPVVRSVKIKSAAPFKDGIPMNEGLVAKEGMVRIDIYEKEGKYFVVPVYRYQLAKGIVPKRAAIAGKSELKWPIMDQTYNFKFSIFKNDLIEIKYAKKDGYFGYYDGFDRHTASLVIENHDNSDRYRGIGVKTGVVEFNKYEVDVLGNYHKVNLGGN

SEQ ID NO: 400 - protein, 1099 aa, Corynebacterium accolens
MSLSYRVGIDVGTYSLGCTAIEVDDNDQPVNILSSVSLIHDSGLDPDQQKRAVTRLASSGVARRTRRLYRRRRRRMINLEKFLTSQGWETRPFEHYSDPYLPWNARVALVNGYISDDAQRGMYLSIAFRHIANHRGWRNPYWKVSSLYSPDKPSDAFEQIRKELEESTGHKIPETVTVGQLISFAQFGKDRLRGGGKKKDEKKPQEQVNQAVISARLHQIDHAREINEICRVQKIDDALRKQILDLVFAAESPKGAQIGRVGKDPLQPKLPRALKASDAFQQYRIVALAGNLRIYRDGVSTPLDRDEKLIVFNYLINLSHKEEPSWLKVAEVLNIDRGQLHGTATMTDDGERAGAAPPVHDTNRTILGCKIKPLVHWWEGANDDERAAMLKALSNSEVEDFDSPAGAQTQAFFANLDESEQEKLDSLHLPIGRAAYSEDTLMRLTSRMLDENLDLYEARLAEFDIPKDWAPPAPRIGEPVGNPAVDRVLKGVARWLEAAADEWGAPKSVVIEHVRDGFISKSKANEIDRANNARHKRNRELFKQMQENLGIDGKLRSSDLWRYQSVQRQNCQCAYCGSPITYTTCEMDHIVPRAGEGSTNTRDNLVATCHRCNLAKKNIPFAVWAAQTNIPGVSVKEALDRTRHWSEDSGMTSKDFKKFRKNVCDRLKRTVVDEPLDARSMESVAWMANELRGRVAQRFQEENTVVNVYRGELTAEARRAAGISDKLRFIDGTGKSRLDRRHHAVDAAVVAFTQNYVAETLAIRSNKKREAQLLQAAEQWKEFTGSDAEHRAAWNAWLPKMQKLAVLLQKALDEDRIAVTSNLRLRLGNGRAHEDSIGELKTIRVGDAISVTDIDRASSEALWCALTREPDFDENNGLPENPDRRIRIHGTWYDAEDDIEVFPVGAGAIKVRGGYAELSRFHHARIYKIPGKKAPVYCMLRVYNADLIRHRHEDLFSVEIKPQTMSVRQAEPKLRKALAENTAEYLGWLVTDDELVIDTSNFNTGQIAEMQSELGQVRRWRLDGFYSPSTLRLRPLQMSAEGLREDTSIGAKKIIDRPGWLPAINKLFGEGHVTVVRRDALGRARLTSNAHLPISWKAE

SEQ ID NO: 401 - protein, 1084 aa, Corynebacterium diphtheriae
MKYHVGIDVGTFSVGLAAIEVDDAGMPIKTLSLVSHIHDSGLDPDEIKSAVTRLASSGIARRTRRLYRRKRRRLQQLDKFIQRQGWPVIELEDYSDPLYPWKVRAELAASYIADEKERGEKLSVALRHIARHRGWRNPYAKVSSLYLPDGPSDAFKAIREEIKRASGQPVPETATVGQMVTLCELGTLKLRGEGGVLSARLQQSDHAREIQEICRMQEIGQELYRKIIDVVFAAESPKGSASSRVGKDPLQPGKNRALKASDAFQRYRIAALIGNLRVWVDGEKRILSVEEKNLVFDHLVNLTPKKEPEWVTIAEILGIDRGQLIGTATMTDDGERAGARPPTHDTNRSIVNSRIAPLVDWWKTASALEQHAMVKALSNAEVDDFDSPERAKVQAFFADLDDDVHAKLDSLHLPVGRAAYSEDTLVRLTRRMLSDGVDLYTARLQEFGIEPSWTPPTPRIGEPVGNPAVDRVLKTVSRWLESATKTWGAPERVIIEHVREGFVTEKRAREMDGDMRRRAARNAKLFQEMQEKLNVQGKPSRADLWRYQSVQRQNCQCAYCGSPITFSNSEMDHIVPRAGQGSTNTRENLVAVCHRCNQSKGNTPFAIWAKNTSIEGVSVKEAVERTRHWVTDTGMRSTDFKKFTKAVVERFQRATMDEEIDARSMESVAWMANELRSRVAQHFASHGTTVRVYRGSLTAEARRASGISGKLEFLDGVGKSRLDRRHHAIDAAVIAFTSDYVAETLAVRSNLKQSQAHRQEAPQWREFTGKDAEHRATWRVWCQKMEKLSALLTEDLRDDRVVVMSNVRLRLGNGSAHEETIGKLSKVKLGSQLSVSDIDKASSEALWCALTREPDFDPKDGLPANPERHIRVNGTHVYAGDNIGLFPVSAGSIALRGGYAELGSSFHHARVYKITSGKKPAFAMLRVYTIDLLPYRNQDLFSVELKPQTMSMRQAEKKLRDALATGNAEYLGWLVVDDELVVDTSKIATDQVKAVEAELGTIRRWRVDGFFGDTRLRLRPLQMSKEGIKKESAPELSKIIDRPGWLPAVNKLFSEGNVTVVRRDSLGRVRLESTAHLPVTWKVQ

SEQ ID NO: 402 - protein, 1084 aa, Corynebacterium diphtheriae
MKYHVGIDVGTFSVGLAAIEVDDAGMPIKTLSLVSHIHDSGLDPDEIKSAVTRLASSGIARRTRRLYRRKRRRLQQLDKFIQRQGWPVIELEDYSDPLYPWKVRAELAASYIADEKERGEKLSVALRHIARHRGWRNPYAKVSSLYLPDGPSDAFKAIREEIKRASGQPVPETATVGQMVTLCELGTLKLRGEGGVLSARLQQSDHAREIQEICRMQEIGQELYRKIIDVVFAAESPKGSASSRVGKDPLQPGKNRALKASDAFQRYRIAALIGNLRVRVDGEKRILSVEEKNLVFDHLVNLAPKKEPEWVTIAEILGIDRGQLIGTATMTDDGERAGARPPTHDTNRSIVNSRIAPLVDWWKTASALEQHAMVKALSNAEVDDFDSPEGAKVQAFFADLDDDVHAKLDSLHLPVGRAAYSEDTLVRLTRRMLADGVDLYTARLQEFGIEPSWTPPAPRIGEPVGNPAVDRVLKTVSRWLESATKTWGAPERVIIEHVREGFVTEKRAREMDGDMQRRAARNAKLFQEMQEKLNVQGKPSRADLWRYQSVQRQNCQCAYCGSPITFSNSEMDHIVPRAGQGSTNTRENLVAVCHRCNQSKGNTPFAIWAKNTSIEGVSVKEAVERTRHWVTDTGMRSPDFKKFTKAVVERFQRATMDEEIDARSMESVAWMANELRSRVAQHFASHGTTVRVYRGSLTAEARRASGISGKLKFFDGVGKSRLDRRHHAIDAAVIAFTSDYVAETLAVRSNLKQSQAHRQEAPQWREFTGKDAEHRAAWRVWCQKMEKLSALLTEDLRDDRVVVMSNVRLRLGNGSAHKETIGKLSKVKLGSQLSVSDIDKASSEALWCALTREPDFDPKEGLPANPERHIRVNGTHVYAGDNIGLFPVSAGSIALRGGYAELGSSFHHARVYKITSGKKPAFAMLRVYTIDLLPYRNQDLFSVELKPQTMSMRQAEKKLRDALATGNAEYLGWLVVDDELVVDTSKIATDQVKAVEAELGTIRRWRVDGFFSPSKLRLRPLQMSKEGIKKESAPELSKIIDRPGWLPAVNKLFSDGNVTVVRRDSLGRVRLESTAHLPVTWKVQ

SEQ ID NO: 403 - protein, 1084 aa, Corynebacterium diphtheriae
MKYHVGIDVGTFSVGLAAIEVDDAGMPIKTLSLVSHIHDSGLDPDKIKSAVTRLASSGIARRTRRLYRRKRRRLQQLDKFIQRQGWPVIELEDYSDPLYPWKVRAELAASYIADEKERGEKLSVALRHIARHRGWRNPYAKVSSLYLPDEPSDAFKAIREEIKRASGQPVPETATVGQMVTLCELGTLKLRGEGGVLSARLQQSDHAREIQEICRMQEIGQELYRKIIDVVFAAESPKGSASSRVGKDPLQPGKNRALKASDAFQRYRIAALIGNLRVRVDGEKRILSVEEKNLVFDHLVNLAPKKEPEWVTIAEILGIDRGQLIGTATMTDDGERAGARPPTHDTNRSIVNSRIAPLVDWWKTASALEQHAMVKALSNAEVDDFDSPEGAKVQAFFADLDDDVHAKLDSLHLPVGRAAYSEDTLVRLTRRMLADGVDLYTARLQEFGIEPSWTPPAPRIGEPVGNPAVDRVLKTVSRWLKSATKTWGAPERVIIEHVREGFVTEKRAREMDGDMRRRAARNAKLFQEMQEKLNVQGKPSRADLWRYQSVQRQNCQCAYCGSPITFSNSEMDHIVPRAGQGSTNTRENLVAVCHRCNQSKGNTPFAIWAKNTSIEGVSVKEAVERTRHWVTDTGMRSTDFKKFTKAVVERFQRATMDEEIDARSMESVAWMANELRSRVAQHFASHGTTVRVYRGSLTAEARRASGISGKLEFLDGVGKSRLDRRHHAIDAAVIAFTSDYVAETLAVRSNLKQSQAHRQEAPQWREFTGKDAEHRAAWRVWCQKMEKLSALLTEDLRDDRVVVMSNVRLRLGNGSAHEETIGKLSKVKLGSQLSVSDIDKASSEALWCALTREPDFDPKDGLPANPERHIRVNGTHVYAGDNIGLFPVSAGSIALRGGYAELGSSFHHARVYKITSGKKPAFAMLRVYTIDLLPYRNQDLFSVELKPQTMSMRQAEKKLRDALATGNAEYLGWLVVDDELVVDTSKIATDQVKAVEAELGTIRRWRVDGFFGDTRLRLRPLQMSKEGIKKESAPELSKIIDRPGWLPAVNKLFSEGNVTVVRRDSLGRVRLESTAHLPVTWKVQ

SEQ ID NO: 404 - protein, 1084 aa, Corynebacterium diphtheriae
MKYHVGIDVGTFSVGLAAIEVDDAGMPIKTLSLVSHIHDSGLDPDKIKSAVTRLASSGIARRTRRLYRRKRRRLQQLDKFIQRQGWPVIELEDYSDPLYPWKVRAELAASYIADEKERGEKLSVALRHIARHRGWRNPYAKVSSLYLPDEPSDAFKAIREEIKRASGQPVPETATVGQMVTLCELGTLKLRGEGGVLSARLQQSDHAREIQEICRMQEIGQELYRKIIDVVFAAESPKGSASSRVGKDPLQPGKNRALKASDAFQRYRIAALIGNLRVRVDGEKRILSVEEKNLVFDHLVNLAPKKEPEWVTIAEILGIDRGQLIGTATMTDDGERAGARPPTHDTNRSIVNSRIAPLVDWWKTASALEQHAMVKALSNAEVDDFDSPEGAKVQAFFADLDDDVHAKLDSLHLPVGRAAYSEDTLVRLTRRMLADGVDLYTARLQEFGIEPSWTPPAPRIGEPVGNPAVDRVLKTVSRWLESATKTWGAPERVIIEHVREGFVTEKRAREMDGDMRRRAARNAKLFQEMQEKLNVQGKPSRADLWRYQSVQRQNCQCAYCGSPITFSNSEMDHIVPRAGQGSTNTRENLVAVCHRCNQSKGNTPFAIWAKNTSIEGVSVKEAVERTRHWVTDTGMRSTDFKKFTKAVVERFQRATMDEEIDARSMESVAWMANELRSRVAQHFASHGTTVRVYRGSLTAEARRASGISGKLEFLDGVGKSRLDRRHHAIDAAVIAFTSDYVAETLAVRSNLKQSQAHRQEAPQWREFTGKDAEHRAAWRVWCQKMEKLSALLTEDLRDDRVVVMSNVRLRLGNGSAHEETIGKLSKVKLGSQLSVSDIDKASSEALWCALTREPDFDPKDGLPANPERHIRVNGTHVYAGDNIGLFPVSAGSIALRGGYAELGSSFHHARVYKITSGKKPAFAMLRVYTIDLLPYRNQDLFSVELKPQTMSMRQAEKKLRDALATGNAEYLGWLVVDDELVVDTSKIATDQVKAVEAELGTIRRWRVDGFFGDTRLRLRPLQMSKEGIKKESAPELSKIIDRPGWLPAVNKLFSEGNVTVVRRDSLGRVRLESTAHLPVTWKVQ

SEQ ID NO: 405 - protein, 1084 aa, Corynebacterium diphtheriae
MKYHVGIDVGTFSVGLAAIEVDDAGMPIKTLSLVSHIHDSGLDPDKMKSAVTRLASSGIARRTRRLYRRKRRRLQQLDKFIQRQGWPVIELEDYSDPLYPWKVRAELAASYIADEKERGEKLSVALRHIARHRGWRNPYAKVSSLYLPDEPSDAFKSIREEIKRASGQPVPETATVGQMVTLCELGTLKLRGEGGVLSARLQQSDHAREIQEICRMQEIGQELYRKIIDVVFAAESPKGSASSRVGKDPLQPGKNRALKASDSFQRYRIAALISNLRVRVDGEKRILSVEEKNLVFDHLVNLAPKKEPEWVTIAEILGIDRGQLIGTATMTDDGERAGARPPTHDTNRSIVNSRIAPLVDWWKTASALEQHAMVKALSNAEVDDFDSPEGAKVQAFFADLDDDVHAKLDSLHLPVGRAAYSEDTLVRLTRRMLADGVDLYTARLQEFGIEPSWTPPAPRIGEPVGNPAVDRVLKTVSRWLESATKTWGAPERVIIEHVRDGFVTEKRAREMDGDMRRRAARNAKLFQEMQEKLNVQGKPSRADLWRYQSVQRQNCQCAYCGSPITFSNSEMDHIVPRAGQGSTNTRENLVAVCHRCNQSKGNTPFAIWAKNTSIEGVSVKEAVERTRHWVTDTGMRSTDFKKFTKAVVERFQRATMDEEIDARSMESVAWMANELRSRVAQHFASHGTTVRVYRGSLTAEARRASGISGKLEFLDGVGKSRLDRRHHAIDAAVIAFTSDYVAETLAVRSNLKQSQAHRQEAPQWREFTGKDAEHRAAWRVWCQKMEKLSALLTEDLRDDRVVVMSNVRLRLGNGSAHEETIGKLSKVKLGSQLSVSDIDKASSEALWCALTREPDFDPKDGLPANPERHIRVNGTHVYAGDNIGLFPVSAGSIALRGGYAELGSSFHHARVYKITSGKKPAFAMLRVYTIDLLPYRNQDLFSVELKPQTMSMRQAEKKLRDALATGNAEYLGWLVVDDELVVDTSKIATDQVKAVEAELGTIRRWRVDGFFGDTRLRLRPLQMSKEGIKKELAPELSKIIDRPGWLPAVNKLFSEGNVTVVRRDSLGRVRLESTAHLPVTWKVQ

SEQ ID NO: 406 - protein, 1084 aa, Corynebacterium diphtheriae
MKYHVGIDVGTFSVGLAAIEVDDAGMPIKTLSLVSHIHDSGLDPDKMKSAVTRLASSGIARRTRRLYRRKRRRLQQLDKFIQRQGWPVIELEDYSDPLYPWKVRAELAASYIADEKERGEKLSVALRHIARHRGWRNPYAKVSSLYLPDEPSDAFKSIREEIKRASGQPVPETATVGQMVTLCELGTLKLRGEGGVLSARLQQSDHAREIQEICRMQEIGQELYRKIIDVVFAAESPKGSASSRVGKDPLQPGKNRALKASDAFQRYRIAALIGNLRVRVDGEKRILSVEEKNLVFDHLVNLAPKKEPEWVTIAEILGIDRGQLIGTATMTDDGERAGARPPTHDTNRSIVNSRIAPLVDWWKTASALEQHAMVKALSNAEVDDFDSPEGAKVQAFFADLDDDVHAKLDSLHLPVGRAAYSEDTLVRLTRRMLADGVDLYTARLQEFGIEPSWTPPAPRIGEPVGNPAVDRVLKTVSRWLESATKTWGAPERVIIEHVREGFVTEKRAREMDGDMRRRAARNAKLFQEMQEKLNVQGKPSRADLWRYQSVQRQNCQCAYCGSPITFSNSEMDHIVPRAGQGSTNTRENLVAVCHRCNQSKGNTPFAIWAKNTSIEGVSVKEAVERTRHWVTDTGMRSTDFKKFTKAVVERFQRATMDEEIDARSMESVAWMANELRSRVAQHFASHGTTVRVYRGSLTAEARRASGISGKLEFLDGVGKSRLDRRHHAIDAAVIAFTSDYVAETLAVRSNLKQSQAHRQEAPQWREFTGKDAEHRAAWRVWCQKMEKLSALLTEDLRDDRVVVMSNVRLRLGNGSAHEETIGKLSKVKLGSQLSVSDIDKASSEALWCALTREPDFDPKDGLPANPERHIRVNGTHVYAGDNIGLFPVSAGSIALRGGYAELGSSFHHARVYKITSGKKPAFAMLRVYTIDLLPYRNQDLFSVELKPQTMSMRQAEKKLRDALATGNAEYLGWLVVDDELVVDTSKIATDQVKAVEAELGTIRRWRVDGFFGDTRLRLRPLQMSKEGIKKESAPELSKIIDRPGWLPAVNKLFSEGNVTVVRRDSLGRVRLESTAHLPVTWKVQ

SEQ ID NO: 407 - protein, 1084 aa, Corynebacterium diphtheriae
MKYHVGIDVGTFSVGLAAIEVDDAGMPIKTLSLVSHIHDSRLDPDKIKSAVTRLASSGIARRTRRLYRRKRRRLQQLDKFIQRQGWPVIELEDYSDPLYPWKVRAELAASYIADEKERGEKLSVALRHIARHRGWRNPYAKVSSLYLPDEPSDAFKAIREEIKRASGQPVPETATVGQMVTLCELGTLKLRGEGGVLSARLQQSDHAREIQEICRMQEIGQELYRKIIDVVFAAESPKGSASSRVGKDPLQPGKNRALKASDAFQRYRIAALIGNLRVRVDGEKRILSVEEKNLVFDHLVNLAPKKEPEWVTIAEILGIDRGQLIGTATMTDDGERAGARPPTHDTNRSIVNSRIAPLVDWWKTASALEQHAMVKALSNAEVDDFDSPEGAKVQAFFADLDDDVHAKLDSLHLPVGRAAYSEDTLVRLTRRMLADGVDLYTARLQEFGIEPSWTPPAPRIGEPVGNPAVDRVLKTVSRWLESATKTWGAPERVIIEHVREGFVTEKRAREMDGDMRRRAARNAKLFQEMQEKLNIQGKPSRADLWRYQSVQRQNCQCAYCGSPITFSNSEMDHIVPRAGQGSTNTRENLVAVCHRCNQSKGNTPFAIWAKNTSIEGVSVKEAVERTRHWVTDTGMRSTDFKKFTKAVVERFQRVTMDEEIDARSMESVAWMANELRSRVAQHFASRGTTVRVYRGSLTAEARRASGISGKLEFLDGVGKSRLDRRHHAIDAAVIAFTSDYVAETLAVRSNLKQSQAHRQEAPQWREFTGKDAEHRAAWRVWCQKMEKLSALLTEDLRDDRVVVMSNVRLRLGNGSAHEETIGKLSKVKLGSQLSVSDIDKASSEALWCALTREPDFDPKDGLPANPERHIRVNGTHVYAGDNIGLFPVSAGSIALRGGYAELGSSFHHARVYKITSGKKPAFAMLRVYTIDLLPYRNQDLFSVELKPQTMSMRQAEKKLRDALATGNAEYLGWLVVDDELVVDTSKIATDQVKAVEAELGTIRRWRVDGFFGDTRLRLRPLQMSKEGIKKESAPELSKIIDRPGWLPAVNKLFSEGNVTVVRRDSLGRVRLESTAHLPVTWKVQ

SEQ ID NO: 408 - protein, 1069 aa, Corynebacterium matruchotii
MAAIAIDDDGKPTEILSAISLIHDSGVDPDSAKSAATRLATSGIARRTRRLYRRKRKRLAKLDKFISSQGWPLKEFEKYEDPFYPWRVRAELATTAITDQQELGEKLSIALRHIARHRGWRNPYSKVTALYTVTEPSDAFLAMQEECAKQLGRTIPETITVGQLVTGMNLGKTRLRGENSLLAARPRQSDNANEIHTIAKVQGLSNELVRQIIDHVFAAESPKGSAAEQVGKDPLQPTKKRALKASDAFQQYRIAALIGNLRIRGGKGNRRLTTEETRLVFDYLRSLPAKQEPTWQLVAEQLKIDRGNLVGTAIMTDDGERAGAKPPVHDTNRIMENTKIKPLATWWKSADADARAAMVKALSNAEVDDFDSQAGAQVQEFFFGISDEDQEKLDGLHLPIGRAAYSEDTLDRLTKRMIGEGMDLYEARQAEFKISNDWAPPAPEIGERVGNPAVDRVLKATARWLNAAERQWGAPKSVNIEHVRAAFMSESSARELDRDNQQRAKRNVKVVAEMQEKLGIEGRPSRADVWRFQSIQRQNGKCAYCGAEISFKNSEMDHIIPQVGEGSTNTRDNLVAVCRECNSSKSNIAFAVWAENTSRPGVSVQKAIERTHHWVTDSGLRKPEFDKFRKQVCDRLRRKATDEPIDARSLESVAWMANELRSRIAQKFKDGDTKVRVYKGALTAEARRASGISGKLEFVDGKGKSRLDRRHHAVDAAVVAFTSNYVAETLALRSNMKFDQELRRKAPQWREFTGSDHVHQVEWTKWKYRMQALAELLNNALVQDRIVVMHNLRLRLGNGAAHEDTIGKLTRLKVGDAISTTDIDRASSEALWCALTRDPDYDPKTGLPENPNRTIRIHGTHLTASDEITVFPVAAASIPIRDGFAKLGSNYHHVRLFRVPSGKKYKYCLMQVYTVDLLKFRKEDLFTVELKPQTISVRTCEALLRKALANGTAEYLGWLVSDDELLIDTSSFDTPGIVKLREEYGPVNRWRLAGLTSVTRLNLRPLYLSKEGLKPNVNPEIKKIIDNRSWIITVNKLFSSGHVKIIRRDALGRPRLHSAAHLPICWEVK

SEQ ID NO: 409 - protein, 210 aa, Diplosphaera colitermitum
MSDILDKPIVLSLNRAWQVIGHRTVKQALVALNGGNADLPPALGLDIAYPKFDDGAWNFDRPLFLNPLPWSEWIELPVRDFDFAITTPRLRIRVPTVIVATQFAKMPVRIPRLTREAIFERDGGVCQYTGEHVGKHGGNLDHVVPRDRGGRDSFENLVWAKREINSLKANRLPHEAGLRLLRRPKAPAPLPASMTIREARHPDWRHFLTP

SEQ ID NO: 410 - protein, 1332 aa, Dolosigranulum pigrum
MQKNYTIGLDIGTNSVGWAVMKDDYTLIRKRMKVLGNTDIKKIKKNFWGVRLFDEGETAKETRLKRGTRRRYQRRRNRLIYLQDIFQQPMLAIDENFFHRLDDSFFVPDDKSYDRHPIFGSLEEEVAYHNTYPTIYHLRKHLADNPEKADLRLVYTALAHIVKYRGHFLIEGELNTENTSISETFEQFLDTYSDIFKEQLVGDISKVEEILSSKQSRSRKHEQIMALFPNENKLGNFGRFMMLIVGNTSNFKPVFDLDDEYKLKLSDETYEEDLDTLLGMTDDVFLDVFMAAKNVYDAVEMSAIISTDTGNSKAVLSNQMINFYDEHKVDLAQLKQFFKTHLPDKYYECFSDPSKNGYAGYIDGKTNQEDFYKYIEKVMKTIKSDKKDYFLDKIDREVFLRKQRSFYNSVIPHQIHLQEMQAILDRQSQYYPFLAENRDKIESLVTFRIPYYVGPLTVSDQSEFAWMERQSDEPIRPWNFDEIVNKERSAEKFIERMTNMDTYLLEEKVLPKRSLLYQTFEVYNELTKVRYTNEQGKTEKLNRQQKAEIIETLFKQKNRVREKDIANYLEQYGYVDGTDIKGVEDKFNASLSTYNDLAKIDGAKAYLDDPEYADVWEDIIKILTIFEDKAMRKKQLQTYSDTLSPEILKKLERKHYTGWGRFSKKLINGLRDEGSNKTILDYLKSDEGSSGPTNRNFMQLIRDNTLSFKKKIEDAQTIEDTTHIYDTVAELPGSPAIKKGIRQALKIVEEIIDIIGYEPENIVVEMARESQTTKKGKDLSKERLEKLTEAIKEFDGPSDVKVKDLKNENLRNDRLYLYYLQNGRDMYTNEPLDINNLSKYDIDHIIPQSFTTDNSIDNKVLVSRTKNQGNKSDDVPSINIVHKMKPFWRQLHKAGLISDRKFKNLTKAEHGGLTEADRAHFLNRQLVETRQITKHVANLLDSQYNTAEEQRINIVLLKSSMTSRFRKEFKLYKVREINDYHHGHDAYLNAVVATTIMKVYPNLKPQFVYGQYKKTSMFKEEKATARKHFYSNITKFFKKEKVVNEETGEILWDTERHLSTIKRVLSWKQMNIVKKVEKQKGQLWKETIYPKGDSSKLIPVKEGMDPQKYGGLSQVSEAFAVVITHEKGKKKQLKSDLISIPIVDQKAYEQHPTAYLEEAGYNNPTVLHELFKYQLFELEDGSRRMIASAKEFQKGNQMVLPLELVELLYHANRYDKVKFPDSIEYVHDNLAKFDDLLEYVIDFSNKYINADKNVQKIQKIYKEHGTEDVELTVESFVNLMTFTAMGAPATFKFYGESITRSRYTSITEFRGSTLIFQSITGLYETRYKLEDN

SEQ ID NO: 411 - protein, 921 aa, Enterococcus faecalis
MIPHQIHLAELQAIIHRQAAYYPFLKENQEKIEQLVTFRIPYYVGPLSKGDASTFAWLKRQSEEPIRPWNLQETVDLDQSATAFIERMTNFDTYLPSEKVLPKHSLLYEKFMVFNELTKISYTDDRGIKANFSGKEKEKIFDYLFKTRRKVKKKDIIQFYRNEYNTEIVTLSGLEEDQFNASFSTYQDLLKCGLTRAELDHPDNAEKLEDIIKILTIFEDRQRIRTQLSTFKGQFSAEVLKKLERKHYTGWGRLSKKLINGIYDKESGKTILGYLIKDDGVSKHYNRNFMQLINDSQLSFKNAIQKAQSSEHEETLSETVNELAGSPAIKKGIYQSLKIVDELVAIMGYAPKRIVVEMARENQTTSTGKRRSIQRLKIVEKAMAEIGSNLLKEQPTTNEQLRDTRLFLYYMQNGKDMYTGDELSLHRLSHYDIDHIIPQSFMKDDSLDNLVLVGSTENRGKSDDVPSKEVVKDMKAYWEKLYAAGLISQRKFQRLTKGEQGGLTLEDKAHFIQRQLVETRQITKNVAGILDQRYNANSKEKKVQIITLKASLTSQFRSIFGLYKVREVNDYHHGQDAYLNCVVATTLLKVYPNLAPEFVYGEYPKFQTFKENKATAKAIIYTNLLRFFTEDEPRFTKDGEILWSNSYLKTIKKELNYHQMNIVKKVEVQKGGFSKESIKPKGPSNKLIPVKNGLDPQKYGGFDSPIVAYTVLFTHEKGKKPLIKQEILGITIMEKTRFEQNRILFLEEKGFLRPRVLMKLPKYTLYEFPEGRRRLLASAKEAQKGNQMVLPEHLLTLLYHAKQCLLPNQSESLTYVEQHQPEFQEILERVVDFAEVHTLAKSKVQQIVKLFEANQTADVKEIAASFIQLMQFNAMGAPSTFKFFQKDIERARYTSIKEIFDATIIYQSTTGLYETRRKVVD

SEQ ID NO: 412 - protein, 1337 aa, Enterococcus faecalis; identical to SEQ ID NO: 124

SEQ ID NO: 413 - protein, 1337 aa, Enterococcus faecalis
MKKDYVIGLDIGTNSVGWAVMTEDYQLVKKKMPIYGNTEKKKIKKNFWGVRLFEEGHTAEDRRLKRTARRRISRRRNRLRYLQAFFEEAMTALDENFFARLQESFLVPEDKKWHRHPIFAKLEDEVAYHETYPTIYHLRKKLADSSEQADLRLIYLALAHIVKYRGHFLIEGKLSTENISVKEQFQQFMIIYNQTFVNGESRLVSAPLPESVLIEEELTEKASRTKKSEKVLQQFPQEKANGLFGQFLKLMVGNKADFKKVFGLEEEAKITYASESYEEDLEGILAKVGDEYSDVFLAAKNVYDAVELSTILADSDKKSHAKLSSSMIVRFTEHQEDLKNFKRFIRENCPDEYDNLFKNEQKDGYAGYITHAGKVSQLKFYQYVKKIIQDIAGAEYFLEKIAQENFLRKQRTFDNGVIPHQIHLAELQAIIHRQAAYYPFLKENQEKIEQLVTFRIPYYVGPLSKGDANTFAWLKRQSEEPIRPWNLQETVDLDQSATAFIERMTNFDTYLPSEKVLPKHSLLYEKFMVFNELTKISYTDDRGIKANFSGKEKEKIFDYLFKTRRKVKKKDIIQFYRNEYNTEIVTLSGLEEDQFNASFSTYQDLLKCGLTRAELDHPDNAEKLEDIIKILTIFEDRQRIRTQLSTFKGQFSAEVLKKLERKHYTGWGRLSKKLINGIYDKESGKTILDYLIKDDGVSKHYNRNFMQLINDSQLSFKNAIQKAQSSEHEETLSETVNELAGSPAIKKGIYQSLKIVDELVAIMGYAPKRIVVEMARENQTTSTGKRRSIQRLKIVEKAMAEIGSNLLKEQPTTNEQLRDTRLFLYYMQNGKDMYTGDELSLHRLSHYDIDHIIPQSFMKDDSLDNLVLVGSTENRGKSDDVPSKEVVKDMKAYWEKLYAAGLISQRKFQRLTKGEQGGLTLEDKAHFIQRQLVETRQITKNVAGILDQRYNAKSKEKKVQIITLKASLTSQFRSIFGLYKVREVNDYHHGQDAYLNCVVATTLLKVYPNLAPEFVYGEYPKFQTFKENKATAKAIIYTNLLRFFTEDEPRFTKDGEILWSNSYLKTIKKELNYHQMNIVKKVEVQKGGFSKESIKPKGPSNKLIPVKNGLDPQKYGGFDSPIVAYTVLFTHEKGKKPLIKQEILGITIMEKTRFEQNPILFLEEKGFLRPRVLMKLPKYTLYQFPEGRRRLLASAKEAQKGNQMVLPEHLLTLLYHAKQCLLPNQSESLAYVEQHQPEFQEILERVVDFAEVHTLAKSKVQQIVKLFEANQTADVKEIAASFIQLMQFNAMGAPSTFKFFQKDIERARYTSIKEIFDATIIYQSTTGLYETRRKVVD

SEQ ID NO: 414 - protein, 1337 aa, Enterococcus faecalis
MKKDYVIGLDIGTNSVGWAVMTEDYQLVKKKMPIYGNTEKKKIKKNFWGVRLFEEGHTAEDRRLKRTARRRISRRRNRLRYLQAFFEEAMTALDENFFARLQESFLVPEDKKWHRHPIFAKLEDEVAYHETYPTIYHLRKKLADSSEQADLRLIYLALAHIVKYRGHFLIEGKLSTENISVKEQFQQFMIIYNQTFVNGESRLVSTPLPESVLIEEELTEKASRTKKSEKVLQQFPQEKANGLFGQFLKLMVGNKADFKKVFGLEEEAKITYASESYEEDLEGILAKVGDEYSDVFLAAKNVYDAVELSTILADSDKKSHAKLSSSMIVRFTEHQEDLKNFKRFIRENCPDEYDNLFKNEQKDGYAGYITHAGKVSQLKFYQYVKKIIQDIAGAEYFLEKIAQENFLRKQRTFDNGVIPHQIHLAELQAIIHRQAAYYPFLKENQEKIEQLVTFRIPYYVGPLSKGDASTFAWLKRQSEEPIRPWNLQETVDLDQSATAFIERMTNFDTYLPSEKVLPKHSLLYEKFMVFNELTKISYTDDRGIKANFSGKEKEKIFDYLFKTRRKVKKKDIIQFYRNEYNTEIVTLSGLEEDQFNASFSTYQDLLKCGLTRAELDHPDNAEKLEDIIKILTIFEDRQRIRTQLSTFKGQFSAEVLKKLERKHYTGWGRLSKKLINGIYDKESGKTILDYLVKDDGVSKHYNRNFMQLINDSQLSFKNAIQKAQSSEHEETLSETVNELAGSPAIKKGIYQSLKIVDELVAIMGYAPKRIVVEMARENQTTSTGKRRSIQRLKIVEKAMAEIGSNLLKEQPTTNEQLRDTRLFLYYMQNGKDMYTGDELSLHRLSHYDIDHIIPQSFMKDDSLDNLVLVGSTENRGKSDDVPSKEVVKDMKAYWEKLYAAGLISQRKFQRLTKGEQGGLTLEDKAHFIQRQLVETRQITKNVAGILDQRYNAKSKEKKVQIITLKASLTSQFRSIFGLYKVREVNDYHHGQDAYLNCVVATTLLKVYPNLAPEFVYGEYPKFQTFKENKATAKAIIYTNLLRFFTEDEPRFTKDGEILWSNSYLKTIKKELNYHQMNIVKKVEVQKGGFSKESIKPKGPSNKLIPVKNGLDPQKYGGFDSPIVAYTVLFTHEKGKKPLIKQEILGITIMEKTRFEQNPILFLEEKGFLRPRVLMKLPKYTLYEFPEGRRRLLASAKEAQKGNQMVLPEHLLTLLYHAKQCLLPNQSESLAYVEQHQPEFQEILERVVDFAEVHTLAKSKVQQIVKLFEANQTADVKEIAASFIQLMQFNAMGAPSTFKFFQKDIERARYTSIKEIFDATIIYQSTTGLYETRRKVVD

SEQ ID NO: 415 - protein, 1337 aa, Enterococcus faecalis
MKKDYVIGLDIGTNSVGWAVMTEDYQLVKKKMPIYGNTEKKKIKKNFWGVRLFEEGHTAEDRRLKRTARRRISRRRNRLRYLQAFFEEAMTDLDENFFARLQESFLVPEDKKWHRHPIFAKLEDEVAYHETYPTIYHLRKKLADSSEQADLRLIYLALAHIVKYRGHFLIEGKLSTENISVKEQFQQFMIIYNQTFVNGESRLVSAPLPESVLIEEELTEKASRTKKSEKVLQQFPQEKANGLFGQFLKLMVGNKADFKKVFGLEEEAKITYASESYEEDLEGILAKVGDEYSDVFLAAKNVYDAVELSTILADSDKKSHAKLSSSMIVRFTEHQEDLKKFKRFIRENCPDEYDNLFKNEQKDGYAGYIAHAGKVSQLKFYQYVKKIIQDIAGAEYFLEKIAQENFLRKQRTFDNGVIPHQIHLAELQAIIHRQAAYYPFLKENQEKIEQLVTFRIPYYVGPLSKGDASTFAWLKRQSEEPIRPWNLQETVDLDQSATAFIERMTNFDTYLPSEKVLPKHSLLYEKFMVFNELTKISYTDDRGIKANFSGKEKEKIFDYLFKTRRKVKKKDIIQFYRNEYNTEIVTLSGLEEDQFNASFSTYQDLLKCGLTRAELDHPDNAEKLEDIIKILTIFEDRQRIRTQLSTFKGQFSAEVLKKLERKHYTGWGRLSKKLINGIYDKESGKTILGYLIKDDGVSKHYNRNFMQLINDSQLSFKNAIQKAQSSEHEETLSETVNELAGSPAIKKGIYQSLKIVDELVAIMGYAPKRIVVEMARENQTTSTGKRRSIQRLKIVEKAMAEIGSNLLKEQPTTNEQLRDTRLFLYYMQNGKDMYTGDELSLHRLSHYDIDHIIPQSFMKDDSLDNLVLVGSTENRGKSDDVPSKEVVKDMKAYWEKLYAAGLISQRKFQRLTKGEQGGLTLEDKAHFIQRQLVETRQITKNVAGILDQRYNANSKEKKVQIITLKASLTSQFRSIFGLYKVREVNDYHHGQDAYLNCVVATTLLKVYPNLAPEFVYGEYPKFQTFKENKATAKAIIYTNLLRFFTEDEPRFTKDGEILWSNSYLKTIKKELNYHQMNIVKKVEVQKGGFSKESIKPKGPSNKLIPVKNGLDPQKYGGFDSPIVAYTVLFTHEKGKKPLIKQEILGITIMEKTRFEQNPILFLEEKGFLRPRVLMKLPKYTLYEFPEGRRRLLASAKEAQKGNQMVLPEHLLTLLYHAKQCLLPNQSESLAYVEQHQPEFQEILERVVDFAEVHTLAKSKVQQIVKLFEANQTADVKEIAASFIQLMQFNAMGAPSTFKFFQKDIERARYTSIKEIFDATIIYQSTTGLYETRRKVVD

SEQ ID NO: 416 - protein, 936 aa, Enterococcus faecalis
MKKDYVIGLDIGTNSVGWAVMTEDYQLVKKKMPIYGNTEKKKIKKNFWGVRLFEEGHTAEDRRLKRTARRRISRRRNRLRYLQAFFEEAMTDLDENFFARLQESFLVPEDKKWHRHPIFAKLEDEVAYHETYPTIYHLRKKLADSSEQADLRLIYLALAHIVKYRGHFLIEGKLSTENISVKEQFQQFMIIYNQTFVNGESRLVSAPLPESVLIEEELTEKASRTKKSEKVLQQFPQEKANGLFGQFLKLMVGNKADFKKVFGLEEEAKITYASESYEEDLEGILAKVGDEYSDVFLAAKNVYDAVELSTILADSDKKSHAKLSSSMIVRFTEHQEDLKKFKRFIRENCPDEYDNLFKNEQKDGYAGYIAHAGKVSQLKFYQYVKKIIQDIAGAEYFLEKIAQENFLRKQRTFDNGVIPHQIHLAELQAIIHRQAAYYPFLKENQEKIEQLVTFRIPYYVGPLSKGDASTFAWLKRQSEEPIRPWNLQETVDLDQSATAFIERMTNFDTYLPSEKVLPKHSLLYEKFMVFNELTKISYTDDRGIKANFSGKEKEKIFDYLFKTRRKVKKKDIIQFYRNEYNTEIVTLSGLEEDQFNASFSTYQDLLKCGLTRAELDHPDNAEKLEDIIKILTIFEDRQRIRTQLSTFKGQFSAEVLKKLERKHYTGWGRLSKKLINGIYDKESGKTILGYLIKDDGVSKHYNRNFMQLINDSQLSFKNAIQKAQSSEHEETLSETVNELAGSPAIKKGIYQSLKIVDELVAIMGYAPKRIVVEMARENQTTSTGKRRSIQRLKIVEKAMAEIGSNLLKEQPTTNEQLRDTRLFLYYMQNGKDMYTGDELSLHRLSHYDIDHIIPQSFMKDDSLDNLVLVGSTENRGKSDDVPSKEVVKDMKAYWEKLYAAGLISQRKFQRLTKGEQGGLTLEDKAHFIQRQLVETR

SEQ ID NO: 417 - protein, 1337 aa, Enterococcus faecalis
MKKDYVIGLDIGTNSVGWAVMTEDYQLVKKKMPIYGNTEKKKIKKNFWGVRLFEEGHTAEDRRLKRTARRRISRRRNRLRYLQAFFEEAMTDLDENFFARLQESFLVPEDKKWHRHPIFAKLEDEVAYHETYPTIYHLRKKLADSSEQADLRLIYLALAHIVKYRGHFLIEGKLSTENISVKEQFQQFMIIYNQTFVNGESRLVSAPLPESVLIEEELTEKASRTKKSEKVLQQFPQEKANGLFGQFLKLMVGNKADFKKVFGLEEEAKITYASESYEEDLEGILAKVGDEYSDVFLAAKNVYDAVELSTILADSDKKSHAKLSSSMIVRFTEHQEDLKKFKRFIRENCPDEYDNLFKNEQKDGYAGYIAHAGKVSQLKFYQYVKKIIQDIAGAEYFLEKIAQENFLRKQRTFDNGVIPHQIHLAELQAIIHRQAAYYPFLKENQEKIEQLVTFRIPYYVGPLSKGDASTFAWLKRQSEEPIRPWNLQETVDLDQSATAFIERMTNFDTYLPSEKVLPKHSLLYEKFMVFNELTKISYTDDRGIKANFSGKEKEKIFDYLFKTRRKVKKKDIIQFYRNEYNTEIVTLSGLEEDQFNASFSTYQDLLKCGLTRAELDHPDNAEKLEDIIKILTIFEDRQRIRTQLSTFKGQFSAEVLKKLERKHYTGWGRLSKKLINGIYDKESGKTILDYLVKDDGVSKHYNRNFMQLINDSQLSFKNAIQKAQSSEHEETLSETVNELAGSPAIKKGIYQSLKIVDELVAIMGYAPKRIVVEMARENQTTSTGKRRSIQRLKIVEKAMAEIGSNLLKEQPTTNEQLRDTRLFLYYMQNGKDMYTGDELSLHRLSHYDIDHIIPQSFMKDDSLDNLVLVGSTENRGKSDDVPSKEVVKDMKAYWEKLYAAGLISQRKFQRLTKGEQGGLTLEDKAHFIQRQLVETRQITKNVAGILNQRYNANSKEKKVQIITLKASLTSQFRSIFGLYKVREVNDYHHGQDAYLNCVVATTLLKVYPNLAPEFVYGEYPKFQTFKENKATAKAIIYTNLLRFFTEDEPRFTKDGEILWSNSYLKTIKKELNYHQMNIVKKVEVQKGGFSKESIKPKGPSNKLIPVKNGLDPQKYGGFDSPVVAYTVLFTHEKGKKPLIKQEILGITIMEKTRFEQNPILFLEEKGFLRPRVLMKLPKYTLYEFPEGRRRLLASAKEAQKGNQMVLPEHLLTLLYHAKQCLLPNQSESLAYVEQHQPEFQEILERVVDFAEVHTLAKSKVQQIVKLFEANQTADVKEIAASFIQLMQFNAMGAPSTFKFFQKDIERARYTSIKEIFDATIIYQSTTGLYETRRKVVD

SEQ ID NO: 418 - protein, 1337 aa, Enterococcus faecalis
MKKDYVIGLDIGTNSVGWAVMTEDYQLVKKKMPIYGNTEKKKIKKNFWGVRLFEEGHTAEDRRLKRTARRRISRRRNRLRYLQAFFEEAMTDLDENFFARLQESFLVPEDKKWHRHPIFAKLEDEVAYHETYPTIYHLRKKLADSSEQADLRLIYLALAHIVKYRGHFLIEGKLSTENISVKEQFQQFMIIYNQTFVNGESRLVSAPLPESVLIEEELTEKASRTKKSEKVLQQFPQEKANGLFGQFLKLMVGNKADFKKVFGLEEEAKITYASESYEEDLEGILAKVGDEYSDVFLAAKNVYDAVELSTILADSDKKSHAKLSSSMIVRFTEHQEDLKKFKRFIRENCPDEYDNLFKNEQKDGYAGYIAHAGKVSQLKFYQYVKKIIQDIAGAEYFLEKIAQENFLRKQRTFDNGVIPHQIHLAELQAIIHRQAAYYPFLKENQEKIEQLVTFRIPYYVGPLSKGDASTFAWLKRQSEEPIRPWNLQETVDLDQSATAFIERMTNFDTYLPSEKVLPKHSLLYEKFMVFNELTKISYTDDRGIKANFSGKEKEKIFDYLFKTRRKVKKKDIIQFYRNEYNTEIVTLSGLEEDQFNASFSTYQDLLKCGLTRAELDHPDNAEKLEDIIKILTIFEDRQRIRTQLSTFKGQFSAEVLKKLERKHYTGWGRLSKKLINGIYDKESGKTILGYLIKDDGVSKHYNRNFMQLINDSQLSFKNAIQKAQSSEHEETLSETVNELAGSPAIKKGIYQSLKIVDELVAIMGYAPKRIVVEMARENQTTSTGKRRSIQRLKIVEKAMAEIGSNLLKEQPTTNEQLRDTRLFLYYMQNGKDMYTGDELSLHRLSHYDIDHIIPQSFMKDDSLDNLVLVGSTENLGKSDDVPSKEVVKDMKAYWEKLYAAGLISQRKFQRLTKGEQGGLTLEDKAHFIQRQLVETRQITKNVAGILDQRYNANSKEKKVQIITLKASLTSQFRSIFGLYKVREVNDYHHGQDAYLNCVVATTLLKVYPNLAPEFVYGEYPKFQTFKENKATAKAIIYTNLLRFFTEDEPRFTKDGEILWSNSYLKTIKKELNYHQMNIVKKVEVQKGGFSKESIKPKGPSNKLIPVKNGLDPQKYGGFDSPIVAYTVLFTHEKGKKPLIKQEILGITIMEKTRFEQNPILFLEEKGFLRPRVLMKLPKYTLYEFPEGRRRLLASAKEAQKGNQMVLPEHLLTLLYHAKQCLLPNQSESLAYVEQHQPEFQEILERVVDFAEVHTLAKSKVQQIVKLFEANQTADVKEIAASFIQLMQFNAMGAPSTFKFFQKDIERARYTSIKEIFDATIIYQSTTGLYETRRKVVD

SEQ ID NO: 419 - protein, 1337 aa, Enterococcus faecalis
MKKDYVIGLDIGTNSVGWAVMTEDYQLVKKKMPIYGNTEKKKIKKNFWGVRLFEEGHTAEDRRLKRTARRRISRRRNRLRYLQAFFEEAMTDLDENFFARLQESFLVPEDKKWHRHPIFAKLEDEVAYHETYPTIYHLRKKLADSSEQADLRLIYLALAHIVKYRGHFLIEGKLSTENTSVKEQFQQFMVIYNQTFVNGESRLVSAPLPESVLIEEELTEKASRTKKSEKVLQQFPQEKANGLFGQFLKLMVGNKADFKKVFGLEEEAKITYASESYEEDLEGILAKVGDEYSDVFLAAKNVYDAVELSTILADSDKKSHAKLSSSMIVRFTEHQEDLKKFKRFIRENCPDEYDNLFKNEQKDGYAGYIAHAGKVSQLKFYQYVKKIIQDIAGAEYFLEKIAQENFLRKQRTFDNGVIPHQIHLAELQAIIHRQAAYYPFLKENQEKIEQLVTFRIPYYVGPLSKGDASTFAWLKRQSEEPIRPWNLQETVDLDQSATAFIERMTNFDTYLPSEKVLPKHSLLYEKFMVFNELTKISYTDDRGIKANFSGKEKEKIFDYLFKTRRKVKKKDIIQFYRNEYNTEIVTLSGLEEDQFNASFSTYQDLLKCGLTRAELDHPDNAEKLEDIIKILTIFEDRQRIRTQLSTFKGQFSAEVLKKLERKHYTGWGRLSKKLINGIYDKESGKTILDYLVKDDGVSKHYNRNFMQLINDSQLSFKNAIQKAQSSEHEETLSETVNELAGSPAIKKGIYQSLKIVDELVAIMGYAPKRIVVEMARENQTTSTGKRRSIQRLKIVEKAMAEIGSNLLKEQPTTNEQLRDTRLFLYYMQNGKDMYTGDELSLHRLSHYDIDHIIPQSFMKDDSLDNLVLVGSTENRGKSDDVPSKKVVKKMKAYWEKLYAAGLISQRKFQRLTKGEQGGLTLEDKAHFIQRQLVETRQITKNVAGILDQRYNAKSKEKKVQIITLKASLTSQFRSIFGLYKVREVNDYHHGQDAYLNCVVATTLLKVYPNLAPEFVYGEYPKFQAFKENKATAKTIIYTNLMRFFTEDEPRFTKDSEILWSNSYLKTIKKELNYHQMNIVKKVEVQKGGFSKESIKPKGPSNKLIPVKNGLDPQKYGGFDSPVVAYTVLFTHEKGKKPLIKQEILGITIMEKTRFEQNPILFLEEKGFLRPRVLMKLPKYTLYEFPEGRRRLLASAKEAQKGNQMVLPEHLLTLLYHAKQCLLPNQSESLAYVEQHQPEFQEILERVVDFAEVHTLAKSKVQQIVKLFEANQTADVKEIAASFIQLMQFNAMGAPSTFKFFQKDIERARYTSIKEIFDATIIYQSTTGLYETRRKVVD

SEQ ID NO: 420 - protein, 1150 aa, Enterococcus faecalis
MYSIGLDLGISSVGWSVIDERTGNVIDLGVRLFSAKNSEKNLERRTNRGGRRLIRRKTNRLKDAKKILAAVGFYEDKSLKNSCPYQLRVKGLTEPLSKGEIYKVTLHILKKRGISYLDEDDTEAAKESQDYKEQVRENAQLLTKYTPGQIQLQRLKENNRVKTGINAQGNYQLNVFKVSAYANELATILKTQQAFYPNELTDDWIALFVQPGIAEEAGLIYRKRPYYHGPGNEANNSPYGRWSDFKKTGQPATNIFDKLIGKDFQGELRASGLSLSAQQYNLLNDLTNLKIDGEIPLSPEQKEYILAELMTKEFTRFGVNDVVKLLGVKKERLSGWRLDKKGKPEIHTLKGYRNWRKIFAESGIDLAMLPTETIDCLAKILTLNTEREGIENTLAFELPELAESVKLLVLDRYKELSQSVSTQAWHRFSLKTLHLLIPELMNATSEQNTLLEQFQLKSDVRKRYSEYKKLPTKDVLTEIYNPTVNKTVSQAFKVIDALLVKYGKEQIRYITIEMPRDDNEEDEKKRIKELHAKNSQRKNDSQSYFMQKSGWSQEKFQTTIQKNRRFLAKLLYYYEQDGICAYTGLSISPELLVSDSTEIDHIIPISISLDDSINNKVLVLSKANQVKGQQTPYDAWMDGSFKKINGKFSNWDDYQKWVESRHFSHKKENNLLETRNIFDSEQVEKFLARNLNDTRYASRLVLNTLQSFFANQETKVRVVNGSFTHTLRKKWGADLDKTRETHHHHAVDATLCAVTPFVKVSRYHYAVKEETGEKVMREIDFETGEIVDEMSYREFKKSKKYERKTYQVKWPNFREQLKPVNLHPRIKFSHQVDRKANRKLSDATIYSVREKTEVKTLKSGKQKITTDEYTIGKIKDIYTVDGWEAFKKKQDKLLMKDLDEKTYERLLSIAETTPDFQEVEEKNGKVKRVKRSPFAVYCEENDIPAIRKYAKKNNGPLIRSLKYYDGKLNKHINITKDSQGRPVEKTKNGRKVTLQSLKPYRYDIYQDLETKAYYTVQLYYSDLRFVEGKYGITEKEYMKKVAEQTKGQVVRFCFSLQKNDGLEIEWKDSQRYDVRFYNFQSANSINFKGLEQEMMPAENQFKQKPYNNGAINLNIAKYGKEGKKLRKFNTDILGKKHYLYYEKEPKNIIK

SEQ ID NO: 421 - protein, 1150 aa, Enterococcus faecalis
MYSIGLDLGISSVGWSVIDERTGNVIDLGVRLFSAKNSEKNLERRTNRGGRRLIRRKTNRLKDAKKILAAVGFYEDKSLKNSCPYQLRVKGLTEPLSKGEIYKVTLHILKKRGISYLDEDDTEAAKESQDYKEQVRKNAQLLTKYTPGQIQLQRLKENNRVKTGINAQGNYQLNVFKVSAYANELATILKTQQAFYPNELTDDWIALFVQPGIAEEAGLIYRKRPYYHGPGNEANNSPYGRWSDFKKTGQPATNIFDRLIGKDFQGELRASGLSLSAQQYNLLNDLTNLKIDGEIPLSPEQKEYILAELMTKEFTRFGVNDVAKLLGVKKERLSGWRLDKKGKPEIHTLKGYRNWRKIFAESGIDLATLPTETIDCLAKVLTLNTEHEGIENTLAFELPELAESVKLLVLDRYKELSQSVSTQAWHRFSLKTLHLLIPELMNATSEQNTLLEQFQLKSDVRKRYSEYKKLPTKDVLTEIYNPTVNKTVSQAFKVIDALLVKYGKEQIRYITIEMPRDDNEEDEKKRIKELHAKNSQRKNDSQSYFMQKSGWSQEKFQTTIQKNRRFLAKLLYYYEQDGICAYTGLSISPELLVSDSTEIDHIIPISISLDDSINNKVLVLSKANQVKGQQTPYDAWMDGSFKKINGKFSNWDDYQKWVESRHFSHKKENNLLETRNIFDSEQVEKFLARNLNDTRYASRLVLNTLQSFFANHETKVRVVNGSFTHTLRKKWGADLDKTRETHHHHAVDATLCAVTPFVKVSRYHYAVKEETGEKVMREIDFETGEIVDEMSYQEFKKSKKYERKTYQVKWPNFREQLKPVNLHPRIKFSHQVDRKANRKLSDATIYSVREKTEVKTLKSGKQKITTDEYTIGKIKDIYTVDGWEAFKKKQDKLLMKDLDEKTYERLLSIAETTPDFQEVEEKNGKVKRVKRSPFAVYCEENDIPAIQKYAKKNNGPLIRSLKYYDGKLNKHINITKDSQGRPVEKTKNGRKVTLQSLKPYRYDIYQDLETKAYYTVQLYYSDLRFVEGKYGITEKEYMKKVAEQTKGQVVRFCFSLQKNDGLEIEWKDSQRYDVRFYNFQSANSINFKGLEQEMMPAENQFKQKPYNNGAINLNIAKYGKEGKKLRKFNTDILGKKHYLYYEKEPKNIIK

SEQ ID NO: 422 - protein, 1150 aa, Enterococcus faecalis
MYSIGLDLGISSVGWSVIDERTGNVIDLGVRLFSAKNSEKNLERRTNRGGRRLIRRKTNRLKDAKKILAAVGFYEDKSLKNSCPYQLRVKGLTEPLSKGEIYKVTLHILKKRGISYLDEDDTEAAKESQDYKEQVRKNAQLLTKYTPGQIQLQRLKENNRVKTGINVQGNYQLNVFKVSAYANELATILKTQQAFYPNELTDDWIALFVQPGIAEEAGLIYRKRPYYHGPGNEANNSPYGRWSDFQKTGEPATNIFDKLIGKDFQGELRASGLSLSAQQYNLLNDLTNLKIDGEVPLSSEQKEYILTELMTKEFTRFGVNDVVKLLGVKKERLSGWRLDKKGKPEIHTLKGYRNWRKIFAEAGIDLATLPTETIDCLAKVLTLNTEREGIENTLAFELPELSESVKLLVLDRYKELSQSISTQSWHRFSLKTLHLLIPELMNATSEQNTLLEQFQLKSDVRKRYSEYKKLPTKDVLAEIYNPTVNKTVSQAFKVIDALLVKYGKEQIRYITIEMPRDDNEEDEKKRIKELHAKNSQRKNDSQSYFMQKSGWSQEKFQTTIQKNRRFLAKLLYYYEQDGICAYTGLPISPELLVSDSTEIDHIIPISISLDDSINNKVLVLSKANQVKGQQTPYDAWMDGSFKKINGKFSNWDDYQKWVESRHFSHKKENNLLETRNIFDSEQVEKFLARNLNDTRYASRLVLNTLQSFFTNQETKVRVVNGSFTHTLRKKWGADLDKTRETHHHHAVDATLCAVTPFVKVSRYHYAVKEETGEKVMREIDFETGEIVNEMSYREFKKSKKYERKTYQVKWPNFREQLKPVNLHPRIKFSHQVDRKANRKLSDATIYSVREKTEVKTLKSGKQKITTDEYTIGKIKDIYTLDGWEAFKKKQDKLLMKDLDEKTYERLLSIAETTPDFQEVEEKNGKVKRVKRSPFAVYCEENDIPAIQKYAKKNNGPLIRSLKYYDGKLNKHINITKDSQGRPVEKTKNGRKVTLQSLKPYRYDIYQDLETKAYYTVQLYYSDLRFVEGKYGITEKEYMKKVAEQTKGQVVRFCFSLQKNDGLEIEWKDSQRYDVRFYNFQSANSINFKGLEQEIMPAENQFKQKPYNNGAINLNIAKYGKEGKKLRKFNTDILGKKHYLFYEKEPKNIIK

SEQ ID NO: 423 - protein, 1150 aa, Enterococcus faecalis; identical to SEQ ID NO: 192

SEQ ID NO: 424 - protein, 1150 aa, Enterococcus faecalis; identical to SEQ ID NO: 193

SEQ ID NO: 425 - protein, 1340 aa, Enterococcus faecium
MKKEYTIGLDIGTNSVGWSVLTDDYRLVSKKMKVAGNTEKSSTKKNFWGVRLFDEGQTAEARRSKRTARRRLARRRQRILELQKIFAPEILKIDEHFFARLNESFLVLDEKKQSRHPVFATIKQEKSYHQTYPTIYHLRQALADSSEKADIRLVYLAMAHLLKYRGHFLIEGELNTENSSVTETFRQFLSTYNQQFSEADDKQTEKLDEAVDCSFVFTEKMSKTKKAETLLKYFPHEKSNGYLSQFIKLMVGNQGNFKNVFGLEEEAKLQFSKETYEEDLEELLEKIGDDYIDLFVQAKNVYDAVLLSEILSDSTKNTRAKLSAGMIRRYDAHKEDLVLLKRFVKENLPKKYRAFFGDNSVNGYAGYIEGHATQEDFYKFVKKELTGIRGSEVFLTKIEQENFLRKQRTFDNGVIPHQIHLTELRAIIANQKKHYPFLKEEQEKLESLLTFKIPYYVGPLAKKQENSPFAWLIRKSEEKIKPWNLPEIVDMEGSAVRFIERMNNTDMYIPHNKVLPKNSLLYQKFSIYNELTKVRYQDERGQMNYFSSIEKKEIFHELFEKNRKVTKKDLQEFLYLKYDIKHAELSGIEKAFNASYTTYHDFLTMSENKREMKQWLEDPELASMFEEIIKTLTVFEDREMIKTRLSHHEATLGKHIIKKLTKKHYTGWGRLSKELIQGIRDKQSNKTILDYLINDDDFPHHRNRNFMQLINDDSLSFKKEIKKAQMITDTENLEEIVKELTGSPAIKKGILQSLKIVDEIVGIMGYEPANIVVEMARENQTTGRGLKSSRPRLKALEESLKDFGSQLLKEYPTDNSSLQKDRLYLYYLQNGRDMYTGAPLDIHRLSDYDIDHIIPRSFTTDNSIDNKVLVSSKENRLKKDDVPSEKVVKKMRSFWYDLYSSKLISKRKLDNLTKIKLTEEDKAGFIKRQLVETRQITKHVAGILHHRFNKAEDTNEPIRKVRIITLKSALVSQFRNRFGIYKVREINEYHHAHDAYLNGVVALALLKKYPQLAPEFVYGEYLKFNAHKANKATVKKEFYSNIMKFFESDTPVCDENGEIFWDKSKSIAQVKKVINHHHMNIVKKTEIQKGGFSKETVEPKKDSSKLLPRKNNWDPAKYGGLGSPNVAYTVAFTYEKGKARKRTNALEGITIMEREAFEQSPVLFLKNKGYEQAEIEMKLPKYALFELENGRKRMVASNKEAQKANSFLLPEHLVTLLYHAKQYDEISHKESFDYVNEHHKEFSEVFARVLEFAGKYTLAEKNIEKLEKIYKENQTDDLAKLASSFVNLMQFNAMGAPADFKFFDVTIPRKRYTSLTEIWQSTIIHQSITGLYETRIRMGK

SEQ ID NO: 426 - protein, 1339 aa, Enterococcus faecium
MKKEYTIGLDIGTNSVGWSVLTDDYRLVSKKMKVAGNTEKSSTKKNFWGVRLFDEGQTAEARRSKRTARRRLARRRQRILELQKIFAPEILKIDEHFFARLNESFLVLDEKKQSRHPVFATIKQEKSYHQTYPTIYHLRQALADSSEKADIRLVYLAMAHLLKYRGHFLIEGELNTENSSVTETFRQFLSTYNQQFSEADDKQTEKLDEAVDCSFVFTEKMSKTKKAETLLKYFPHEKSNGYLSQFIKLMVGNQGNFKNVFGLEEAKLQFSKETYEEDLEELLEKIGDDYIDLFVQAKNVYDAVLLSEILSDSTKNTRAKLSAGMIRRYDAHKEDLVLLKRFVKENLPKKYRAFFGDNSVNGYAGYIEGHATQEDFYKFVKKELTGIRGSEVFLTKIEQENFLRKQRTFDNGVIPHQIHLTELRAIIANQKKHYPFLKEEQEKLESLLTFKIPYYVGPLAKKQENSPFAWLIRKSEEKIKPWNLPEIVDMEGSAVRFIERMINTDMYMPHNKVLPKNSLLYQKFSIYNELTKVRYQDERGQMNYFSSIEKKEIFHELFEKNRKVTKKDLQEFLYLKYDIKHAELSGIEKAFNASYTTYHDFLTMSENKREMKQWLEDPELASMFEEIIKTLTVFEDREMIKTRLSHHEATLGKHIIKKLTKKHYTGWGRLSKELIQGIRDKQSNKTILDYLINDDDFPHHRNRNFMQLINDDSLSFKKEIKKAQMITDTENLEEIVKELTGSPAIKKGILQSLKIVDEIVGIMGYEPANIVVEMARENQTTGRGLKSSRPRLKALEESLKDFGSQLLKEYPTDNSSLQKDRLYLYYLQNGRDMYTGAPLDIHRLSDYDIDHIIPRSFTTDNSIDNKVLVSSKENRLKKDDVPSEKVVKKMRSFWYDLYSSKLISKRKLDNLTKIKLTEEDKAGFIKRQLVETRQITKHVAGILHHRFNKAEDTNEPIRKVRIITLKSALVSQFRNRFGIYKVREINEYHHAHDAYLNGVVALALLKKYPQLAPEFVYGEYLKFNAHKANKATVKKEFYSNIMKFFESDTPVCDENGEIFWDKSKSIAQVKKVINHHHMNIVKKTEIQKGGFSKETVEPKKDSSKLLPRKNNWDPAKYGGLGSPNVAYTVAFTYEKGKARKRTNALEGITIMEREAFEQSPVLFLKNKGYEQAEIEMKLPKYALFELENGRKRMVASNKEAQKANSFLLPEHLVTLLYHAKQYDEISHKESFDYVNEHHKEFSEVFARVLEFAGKYTLAEKNIEKLEKIYKENQTDDLAKLASSFVNLMQFNAMGAPADFKFFDVTIPRKRYTSLTEIWQSTIIHQSITGLYETRIRMGK

SEQ ID NO: 427 - protein, 1340 aa, Enterococcus faecium
MKKEYTIGLDIGTNSVGWSVLTDDYRLVSKKMKVAGNTEKSSTKKNFWGVRLFDEGQTAEARRSKRTARRRLARRRQRILELQKIFAPEILKIDEHFFARLNESFLVLDEKKQSRHPVFATIKQEKSYHQTYPTIYHLRQALADSSEKADIRLVYLAMAHLLKYRGHFLIEGELNTENSSVTETFRQFLSTYNQQFSEADDKQTEKLDEAVDCSFVFTEKMSKTKKAETLLKYFPHEKSNGYLSQFIKLMVGNQGNFKNVFGLEEEAKLQFSKETYEEDLEELLEKIGDDYIDLFVQAKNVYDAVLLSEILSDSTKNTRAKLSAGMIRRYDAHKEDLVLLKRFVKENLPKKYRAFFGDNSVNGYAGYIEGHATQEDFYKFVKKELTGIRGSEVFLTKIEQENFLRKQRTFDNGVIPHQIHLTELRAIIANQKKHYPFLKEEQEKLESLLTFKIPYYVGPLAKKQENSPFAWLIRKSEEKIKPWNLPEIVDMEGSAVRFIERMINTDMYIPHNKVLPKNSLLYQKFSIYNELTKVRYQDERGQMNYFSSIEKKEIFHELFEKNRKVTKKDLQEFLYLKYDIKHAELSGIEKAFNASYTTYHDFLTMSENKREMKQWLEDPELASMFEEIIKTLTVFEDREMIKTRLSHHEATLGKHIIKKLTKKHYTGWGRLSKELIQGIRDKQSNKTILDYLINDDDFPHHRNRNFMQLINDDSLSFKKEIKKAQMITDTENLEEIVKELTGSPAIKKGILQSLKIVDEIVGIMGYEPANIVVEMARENQTTGRGLKSSRPRLKALEESLKDFGSQLLKEYPTDNSSLQKDRLYLYYLQNGRDMYTGAPLDIHRLSDYDIDHIIPRSFTTDNSIDNKVLVSSKENRLKKDDVPSEKVVKKMRSFWYDLYSSKLISKRKLDNLTKIKLTEEDKAGFIKRQLVETRQITKHVAGILHHRFNKAEDTNEPIRKVRIITLKSALVSQFRNRFGIYKVREINEYHHAHDAYLNGVVALALLKKYPQLAPEFVYGEYLKFNAHKANKATVKKEFYSNIMKFFESDTPVCDENGEIFWDKSKSIAQVKKVINHHHMNIVKKTEIQKGGFSKETVEPKKDSSKLLPRKNNWDPAKYGGLGSPNVAYTVAFTYEKGKARKRTNALEGITIMEREAFEQSPVLFLKNKGYEQAEIEMKLPKYALFELENGRKRMVASNKEAQKANSFLLPEHLVTLLYHAKQYDEISHKESFDYVNEHHKEFSEVFARVLEFAGKYTLAEKNIEKLEKIYKENQTDDLAKLASSFVNLMQFNAMGAPADFKFFDVTIPRKRYTSLTEIWQSTIIHQSITGLYETRIRMGK

SEQ ID NO: 428 - protein, 1340 aa, Enterococcus faecium
MKKEYTIGLDIGTNSVGWSVLTDDYRLVSKKMKVAGNTEKSSTKKNFWGVRLFDEGQTAEARRSKRTARRRLARRRQRILELQKIFAPEILKIDEHFFARLNESFLVLDEKKQSRHPVFATIKQEKSYHQTYPTIYHLRQALADSSEKADIRLVYLAMAHLLKYRGHFLIEGELNTENSSVTETFRQFLSTYNQQFSEADDKQTEKLDEAVDCSFVFTEKMSKTKKAETLLKYFPHEKSNGYLSQFIKLMVGNQGNFKNVFGLEEEAKLQFSKETYEEDLEELLEKIGDDYIDLFVQAKNVYDAVLLSEILSDSTKNTRAKLSAGMIRRYDAHKEDLVLLKRFVKENLPKKYRAFFGDNSVNGYAGYIEGHATQEDFYKFVKKELTGIRGSEVFLTKIEQENFLRKQRTFDNGVIPHQIHLTELRAIIANQKKHYPFLKEEQEKLESLLTFKIPYYVGPLAKKQENSPFAWLIRKSEEKIKPWNLPEIVDMEGSAVRFIERMINTDMYMPHNKVLPKNSLLYQKFSIYNELTKVRYQDERGQMNYFSSIEKKEIFHELFEKNRKVTKKDLQEFLYLKYDIKHAELSGIEKAFNASYTTYHDFLTMSENKREMKQWLEDPELASMFEEIIKTLTVFEDREMIKTRLSHHEATLGKHIIKKLTKKHYTGWGRLSKELIQGIRDKQSNKTILDYLINDDDFPHHRNRNFMQLINDDSLSFKKEIKKAQMITDTENLEEIVKELTGSPAIKKGILQSLKIVDEIVGIMGYEPANIVVEMARENQTTGRGLKSSRPRLKALEESLKDFGSQLLKEYPTDNSSLQKDRLYLYYLQNGRDMYTGAPLDIHRLSDYDIDHIIPRSFTTDNSIDNKVLVSSKENRLKKDDVPSEKVVKKMRSFWYDLYSSKLISKRKLDNLTKIKLTEEDKAGFIKRQLVETRQITKHVAGILHHRFNKAEDTNEPIRKVRIITLKSALVSQFRNRFGIYKVREINEYHHAHDAYLNGVVALALLKKYPQLAPEFVYGEYLKFNAHKANKATVKKEFYSNIMKFFESDTPVCDENGEIFWDKSKSIAQVKKVINHHHMNIVKKTEIQKGGFSKETVEPKKDSSKLLPRKNNWDPAKYGGLGSPNVAYTVAFTYEKGKARKRTNALEGITIMEREAFEQSPVLFLKNKGYEQAEIEMKLPKYALFELENGRKRMVASNKEAQKANSFLLPEHLVTLLYHAKQYDEISHKESFDYVNEHHKEFSEVFARVLEFAGKYTLAEKNIEKLEKIYKENQTDDLAKLASSFVNLMQFNAMGAPADFKFFDVTIPRKRYTSLTEIWQSTIIHQSITGLYETRIRMGK

SEQ ID NO: 429 - protein, 1339 aa, Enterococcus faecium
MKKEYTIGLDIGTNSVGWSVLTDDYRLVSKKMKVAGNTEKSSTKKNFWGVRLFDEGQTAEARRSKRTARRRLARRRQRILELQKIFAPEILKIDEHFFARLNESFLVLDEKKQSRHPVFATIKQEKSYHQTYPTIYHLRQALADSSEKADIRLVYLAMAHLLKYRGHFLIEGELNTENSSVTETFRQFLSTYNQQFSEADDKQTEKLDEAVDCSFVFTEKMSKTKKAETLLKYFPHEKSNGYLSQFIKLMVGNQGNFKNVFGLEEAKLQFSKETYEEDLEELLEKIGDDYIDLFVQAKNVYDAVLLSEILSDSTKNTRAKLSAGMIRRYDAHKEDLVLLKRFVKENLPKKYRAFFGDNSVNGYAGYIEGHATQEDFYKFVKKELTGIRGSEVFLTKIEQENFLRKQRTFDNGVIPHQIHLTELRAIIANQKKHYPFLKEEQEKLESLLTFKIPYYVGPLAKKQENSPFAWLIRKSEEKIKPWNLPEIVDMEGSAVRFIERMINTDMYIPHNKVLPKNSLLYQKFSIYNELTKVRYQDERGQMNYFSSIEKKEIFHELFEKNRKVTKKDLQEFLYLKYDIKHAELSGIEKAFNASYTTYHDFLTMSENKREMKQWLEDPELASMFEEIIKTLTVFEDREMIKTRLSHHEATLGKHIIKKLTKKHYTGWGRLSKELIQGIRDKQSNKTILDYLINDDDFPHHRNRNFMQLINDDSLSFKKEIKKAQMITDTENLEEIVKELTGSPAIKKGILQSLKIVDEIVGIMGYEPANIVVEMARENQTTGRGLKSSRPRLKALEESLKDFGSQLLKEYPTDNSSLQKDRLYLYYLQNGRDMYTGAPLDIHRLSDYDIDHIIPRSFTTDNSIDNKVLVSSKENRLKKDDVPSEKVVKKMRSFWYDLYSSKLISKRKLDNLTKIKLTEEDKAGFIKRQLVETRQITKHVAGILHHRFNKAEDTNEPIRKVRIITLKSALVSQFRNRFGIYKVREINEYHHAHDAYLNGVVALALLKKYPQLAPEFVYGEYLKFNAHKANKATVKKEFYSNIMKFFESDTPVCDENGEIFWDKSKSIAQVKKVINHHHMNIVKKTEIQKGGFSEETVEPKKDSSKLLPRKNNWDPAKYGGLGSPNVAYTVAFTYEKGKARKRTNALEGITIMEREAFEQSPVLFLKNKGYEQAEIEMKLPKYALFELENGRKRMVASNKEAQKANSFLLPEHLVTLLYHAKQYDEISHKESFDYVNEHHKEFSEVFARVLEFAGKYTLAEKNIEKLEKIYKENQTDDLAKLASSFVNLMQFNAMGAPADFKFFDVTIPRKRYTSLTEIWQSTIIHQSITGLYETRIRMGK

SEQ ID NO: 430 - protein, 1340 aa, Enterococcus faecium
MKKEYTIGLDIGTNSVGWSVLTDDYRLVSKKMKVAGNTEKSSTKKNFWGVRLFDEGQTAEARRSKRTARRRLARRRQRILELQKIFAPEILKIDEHFFARLNESFLVLDEKKQSRHPVFATIKQEKSYHQTYPTIYHLRQALADSSEKADIRLVYLAMAHLLKYRGHFLIEGELNTENSSVTETFRQFLSTYNQQFSEADDKQTEKLDEAVDCSFVFTEKMSKTKKAETLLKYFPHEKSNGYLSQFIKLMVGNQGNFKNVFGLEEEAKLQFSKETYEEDLEELLEKIGDDYIDLFVQAKNVYDAVLLSEILSDSTKNTRAKLSAGMIRRYDAHKEDLVLLKRFVKENLPKKYRAFFGDNSVNGYAGYIEGHATQEDFYKFVKKELTGIRGSEVFLTKIEQENFLRKQRTFDNGVIPHQIHLTELRAIIANQKKHYPFLKEEQEKLESLLTFKIPYYVGPLAKKQENSPFAWLIRKSEEKIKPWNLPEIVDMEGSAVRFIERMINTDMYIPHNKVLPKNSLLYQKFSIYNELTKVRYQDERGQMNYFSSIEKKEIFHELFEKNRKVTKKDLQEFLYLKYDIKHAELSGIEKAFNASYTTYHDFLTMSENKREMKQWLEDPELASMFEEIIKTLTVFEDREMIKTRLSHHEATLGKHIIKKLTKKHYTGWGRLSKELIQGIRDKQSNKTILDYLINDDDFPHHRNRNCMQLINDDSLSFKKEIKKAQMITDTENLEEIVKELTGSPAIKKGILQSLKIVDEIVGIMGYEPANIVVEMARENQTTGRGLKSSRPRLKALEESLKDFGSQLLKEYPTDNSSLQKDRLYLYYLQNGRDMYTGAPLDIHRLSDYDIDHIIPRSFTTDNSIDNKVLVSSKENRLKKDDVPSEKVVKKMRSFWYDLYSSKLISKRKLDNLTKIKLTEEDKAGFIKRQLVETRQITKHVAGILHHRFNKAEDTNEPIRKVRIITLKSALVSQFRNRFGIYKVREINEYHHAHDAYLNGVVALALLKKYPQLAPEFVYGEYLKFNAHKANKATVKKEFYSNIMKFFESDTPVCDENGEIFWDKSKSIAQVKKVINHHHMNIVKKTEIQKGGFSKETVEPKKDSSKLLPRKNNWDPTKYGGLGSPNVAYTVAFTYEKGKARKRTNALEGITIMEREAFEQSPVLFLKNKGYEQAEIEMKLPKYALFELENGRKRMVASNKEAQKANSFLLPEHLVTLLYHAKQYDEISHKESFDYVNEHHKEFSEVFARVLEFAGKYTLAEKNIEKLEKIYKENQTDDLAKLASSFVNLMQFNAMGAPADFKFFDVTIPRKRYTSLTEIWQSTIIHQSITGLYETRIRMGK

SEQ ID NO: 431 - protein, 892 aa, Enterococcus faecium
MTFKIPYYVGPLAKKQENSPFAWLIRKSEEKIKPWNLPEIVDMEGSAVRFIERMINTDMYMPHNKVLPKNSLLYQKFSIYNELTKVRYQDERGQMNYFSSIEKKEIFHELFEKNRKVTKKDLQEFLYLKYDIKHAELSGIEKAFNASYTTYHDFLTMSENKREMEQWLEDPELASMFEEIIKTLTVFEDREMIKTRLSHHKATLGKHIIKKLTKKHYTGWGRLSKELIQGIRDKQSNKTILDYLINDDDFPHHRNRNFMQLINDDSLSFKKEIKKAQMITDTENLEEIVKELTGSPAIKKGILQSLKIVDEIVGIMGYEPANIVVEMARENQTTGRGLKSSRPRLKALEESLKDFGSQLLKEYPTDNSSLQKDRLYLYYLQNGRDMYTGAPLDIHRLSDYDIDHIIPRSFTTDNSIDNKVLVSSKENRLKKDDVPSEKVVKKMRSFWYDLYSSKLISKRKLDNLTKIKLTEEDKAGFIKRQLVETRQITKHVAGILHHRFNKAEDTNEPIRKVRIITLKSALVSQFRNRFGIYKVREINEYHHAHDAYLNGVIALALLKKYPQLAPEFVYGEYLKFNAHKANKATVKKEFYSNIMKFFESDTPVCDENGEIFWDKSKSIAQVKKVINHHHMNIVKKTEIQKGGFSKETVEPKKDSSKLLPRKNNWDPAKYGGLGSPNVAYTVAFTYEKGKARKRTNALEGITIMEREAFEQSPVLFLKNKGYEQAEIEMKLPKYALFELENGRKRMVASNKEAQKANSFLLPEHLVTLLYHAKQYDEISHKESFDYVNEHHKEFSEVFARVLEFAGKYTLAEKNIEKLEKIYKENQTDDLAKLASSFVNLMQFNAMGAPADFKFFDVTIPRKRYTSLTEIWQSTIIHQSITGLYETRIRMGK

SEQ ID NO: 432 - protein, 1336 aa, Enterococcus hirae
MTKDYTIGLDIGTNSVGWAVLTDDYQLMKRKMSVHGNTEKKKIKKNFWGARLFDEGQTAEFRRTKRTNRRRLARRKYRLSKLQDLFAEELCKQDDCFFVRLEESFLVPEEKQYKPASIFPTLEEEKEYYQKYPTIYHLRQKLVDSTEKEDLRLVYLALAHLLKYRGHFLFEGDLDTENTSIEESFRVFLEQYSKQSDQPLIVHQPVLTILTDKLSKTKKVEEILKYYPTEKINSFFAQCLKLIVGNQANFKRIFDLEAEVKLQFSKETYEEDLESLLEKIGDEYLDIFLQAKKVHDAILLSEIISSTVKHTKAKLSSGMVERYERHKADLAKFKQFVKENVPQKATVFFKDTTKNGYAGYIKGKTTQEEFYKFVKKELSGVVGSEPFLEKIDQETFLLKQRTYTNGVIPHQVHLIELKAIIDQQKQHYPFLEEAGPKIIALFKFRIPYYVGPLAKEQEASSFAWIERKTAEKINPWNFSEVVDIEKSAMRFIQRMTKQDTYLPTEKVLPKNSLLYQKYMIFNELTKVSYKDERGVKQYFSGDEKQQIFKQLFQKERGKITVKKLQNFLYTHYHIENAQIFGIEKAFNASYSTYHDFMKLAKTNQKAMQEWLEQPEMEPIFEDIVKILTIFEDRQMIKHQLSKYQEVFGEKLLKEFARKHYTGWGRFSAKLIHGIRDRKTNKTILDYLINDDDVPANRNRNLMQLINDEHLSFKEEIAKATVFSKHKSLVDVIQDLPGSPAIKKGIWQSLKIVEELIAIIGYKPKNIVIEMARENQKTHRTSPRLKALENGLKQIGSTLLKEQPTDNKALQKERLYLYYLQNGRDMYTGEPLEIENLHQYEVDHIIPRSFIVDNSIDNKVLVASKQNQKKRDDVPKKQIVNEQRIFWNQLKEAKLISPKKYAYLTKIELTPEDKARFIQRQLVETRQITKHVANILHQSFNQEEEGTDCDGVQIITLKATLTSQFRQTFGLYKVREINPHHHAHDAYLNGFIANVLLKRYPKLAPEFVYGKYVKYSLARENKATAKKEFYSNILKFLESDEPFCDENGEIYWEKSHHLPRIKKVLSSHQVNVVKKVEQQKGGFYKETVNSKEKPDKLIERKNNWDVTKYGGFGSPVIAYAIAFVYAKGKTQKKTRAIEGITIMEQAAFEKDPTTFLKEKGFPQVTEFIKLPKYTLFEFDNGRRRFLASHKESQKGNPFILSDQLVTLLYHAQHYDKITYQESFDYVNTHLSDFSAILTEVLAFAEKYTLADKNIERIQELYEENKYGETSMIAQSFLQLLQFNAIGAPADFKFFGVTIPRKRYTSLTEIWDATIIYQSVTGLYETRIRMGDLWAGEQ

SEQ ID NO: 433 - protein, 116 aa, Enterococcus sp.
MYSIGLDLGISSVGWSVIDERTGNVIDLGVRLFSAKNSEKNLERRTNRGGRRLIRRKTNRLKDAKKILAAVGFYEDKSLKNSCPYQLRVKGLTELLSKGEIYKVTLHILKNVELVT

SEQ ID NO: 434 - protein, 1391 aa, Eubacterium sp.
MENKQYYIGLDVGTNSVGWAVTDTSYNLLRAKGKDMWGARLFDEAKTAVERRTKRTSRRRSEREKARKAMLKELFADEINKVDPNFFIRLEESKFFLDDRSENNRQRYTLFNDAKFTDKDYYEKYKTIFHLRSALINSDEKFDVRLVFLAILNLFSHRGHFLNASLKGDGEIQGVDIFYNDLYEVCEEFEIDLPQISNIDNFEKILSQKGKSRTKILEELSEELSISKKEKIKYSLLKLICGMKIKVVDIYADEDIQEDDKKKDLGFRESDYEKSSLEVKEIIGDDHFELIERAKAVHDIGLLANIIGNSKYLCEARVEAYDNHHKDLQKIKELLKKYDIKAYTDMFRKMTDKNYSAYVGSVNSNIAKERRSVDNRKIEDLYEYIKKIALKNISDDNEDKIEILKKIETGEFLKKQLTASNGVIPNQLQSRELRAILKKAENYLPFLKEKGEKNLTVSEMIIQLFEFQIPYYVGPLDKNPKKDKNANSWAVIPSGGRILPWNFEDKVDVKGSRKEFIEKMVRKCTYLSEEHTLPKQSLLYEKFMVLNEINNIKIDGEKISVEAKQKIYNDLFMKGKKVSQKAIKQELISLNIMSKDSVLSGIDTVCNAYLSSIAKFRGVFDENVNNQSTIDMIEDIIFLKTVYSDEKRFVKEEIVEKYGDEIDKDKIKRILGFKFSNWGNISKSFLELEGADVGTGEIRSIIQSLWETNFNLMELLSSRFTYMDELEKRVKKLEKPLSEWTIEDLDDMYLSSPVKRMIWQSMKIVDEIQTVIGYAPKRIFVEMTRSEGEKVRTKSRKDRLKELYSAIKEDSKQWVKELDAKDESYFRSKKMYLYYLQKGRCMYSGEVIELDKLMDDNLYDIDHIYPRSFVKDDSLDNLVLVKKEINNRKQNDPITPQIQASCQGFWKVLHEQGFISNEKYSRLTRKTQEFSDEEKLSFINRQIVETGQATKCMAQILQKSMGEDVDVVFSKARLVSEFRHKFELFKSRLINDFHHANDAYLNIVVGNSYFVKFTRNPANFIKDARKNPDNPAYKYHMDRFFERDVKSKSEVAWIGQSEGNAGTIAIVKKTMSKNSPLITKKVEEGHGSITKETIVGVKEIKFGRNKVEKADKTPKKANLQAYRPIKTSDERLCNILRYGGRTSISISGYCLVEYVKKRKTIRSLEAIPVYLGRKDSLSEEKLLNYFRYNLNDGGKDSVSDIRLCLPFISTNSLVKIDGYLYYLGGKNDDRIQLYNAYQLKMKKEEVEYIRKIEKAVSMSKFDEIDREKNPVLTEEKNIELYNKIQDKFENTVFSKRMSLVKYNKKDLSFGDFLKNKKSKFEEIDLEKQCKVLYNIIFNLSNLKEVDLSDIGGSKSTGKCRCKKNITNYKEFKLIQQSITGLYSCEKDLMTI

SEQ ID NO: 435 - protein, 1391 aa, Eubacterium yurii
MENKQYYIGLDVGTNSVGWAVTDTSYNLLRAKGKDMWGARLFEKANTAAERRTKRTSRRRSEREKARKAMLKELFADEINRVDPSFFIRLEESKFFLDDRSENNRQRYTLFNDATFTDKDYYEKYKTIFHLRSALINSDEKFDVRLVFLAILNLFSHRGHFLNASLKGDGDIQGMDVFYNDLVESCEYFEIELPRITNIDNFEKILSQKGKSRTKILEELSEELSISKKDKSKYNLIKLISGLEASVVELYNIEDIQDENKKIKIGFRESDYEESSLKVKEIIGDEYFDLVERAKSVHDMGLLSNIIGNSKYLCEARVEAYENHHKDLLKIKELLKKYDKKAYNDMFRKMTDKNYSAYVGSVNSNIAKERRSVDKRKIEDLYKYIEDTALKNIPDDNKDKIEILEKIKLGEFLKKQLTASNGVIPNQLQSRELRAILKKAENYLPFLKEKGEKNLTVSEMIIQLFEFQIPYYVGPLDKNPKKDNKANSWAKIKQGGRILPWNFEDKVDVKGSRKEFIEKMVRKCTYISDEHTLPKQSLLYEKFMVLNEINNIKIDGEKISVEAKQKIYNDLFVKGKKVSQKDIKKELISLNIMDKDSVLSGTDTVCNAYLSSIGKFTGVFKEEINKQSIVDMIEDIIFLKTVYGDEKRFVKEEIVEKYGDEIDKDKIKRILGFKFSNWGNLSKSFLELEGADVGTGEVRSIIQSLWETNFNLMELLSSRFTYMDELEKRVKKLEKPLSEWTIEDLDDMYLSSPVKRMIWQSMKIVDEIQTVIGYAPKRIFVEMTRSEGEKVRTKSRKDRLKELYNGIKEDSKQWVKELDSKDESYFRSKKMYLYYLQKGRCMYSGEVIELDKLMDDNLYDIDHIYPRSFVKDDSLDNLVLVKKEINNRKQNDPITPQIQASCQGFWKILHDQGFMSNEKYSRLTRKTQEFSDEEKLSFINRQIVETGQATKCMAQILQKSMGEDVDVVFSKARLVSEFRHKFELFKSRLINDFHHANDAYLNIVVGNSYFVKFTRNPANFIKDARKNPDNPVYKYHMDRFFERDVKSKSEVAWIGQSEGNSGTIVIVKKTMAKNSPLITKKVEEGHGSITKETIVGVKEIKFGRNKVEKADKTPKKPNLQAYRPIKTSDERLCNILRYGGRTSISISGYCLVEYVKKRKTIRSLEAIPVYLGRKDSLSEEKLLNYFRYNLNDGGKDSVSDIRLCLPFISTNSLVKIDGYLYYLGGKNDDRIQLYNAYQLKMKKEEVEYIRKIEKAVSMSKFDEIDREKNPVLTEEKNIELYNKIQDKFENTVFSKRMSLVKYNKKDLSFGDFLKNKKSKFEEIDLEKQCKVLYNIIFNLSNLKEVDLSDIGGSKSTGKCRCKKNITNYKEFKLIQQSITGLYSCEKDLMTI

SEQ ID NO: 436 - protein, 1142 aa, Facklamia hominis
MYSVGLDIGIASCGYSIINDVNGNIVELGTLLFKSRNSDNNEERRTNRGSRRLINRRRTRLDDGKKLLAEKGFKQDSKLKHVCPYELRVKGLHEKLTQGEIYKVVLHILKKRGISYLDESDENSSGIDGASYKDQVNLNLNLQKELTPGQIQLKRLKENGRIKSGVTFENGYQLNVFSVSAYANELNKILTKQSEYYSEIDQIWIDRFTKNGYRKEAGLVYRKRPYYDGPGNEKNNSIYGRWANFKEDGHPKENIFDQLIGLDSVDSTQVRASASTLTAQKYNLLNDLNNLTIIEDDRKFTTDEKVSIINYLMTQDITRFGPKELAKFYQLEVDQIRGWRIDNKGNPEIHSLKVYRDWKKIFNTSSIDLTSIQTWVVDELANVITLNTEIPSTLATLKIKIPDIDQQILNFVENNFYELKKKTSKNSWHSFSLKTLNILIPELLNTSEEQNTILERLNLKFDLKNKYAEKNQIPVKELLEQIYNPTVTKSVHQSIKLFNEIIEKYGKNNISYVTIEMPRDKNDQDQKDTIKRINKLNSERKNDSEKYFLERSGWDTIRFESALKKPRFAEKLLFYYEQKGKCAYSGQDILAESLLNESCEVDHIIPLSISFDDSIHNKVLVTASSNQEKGQRTPYMAFIDGAKLGQSWDDFVAWVNSCGFHRKKVQNLLYEENIFNPDVQRGFVSRNLNDTRYASRIVLNAIQSFFYKQKDLTKVKVVNGSFTHTLRKKWGSSLDKNRDTYHHHAVDATLCAVTPFINIVKYEFFEEDGIKYMVDLTTGEKVAYSDYKKMKFYDKRAYVPIWDGFIKQLTPANLYPKIKFSHQVDSKWNRKISDATIYSTRKIVETKINKKGVAKETVKDIVIDKIKDIYTPEGWRKFKEKQDKLLMKNFDEKTYNKLIKIAKEYPEKKEVQTSNGKVSLVEVSPFKMYCEEQNVPAIRKYSKKGNGPYIRSLKFYDKELGKHINITKDSYGNDIERTIRNKKIILKNQNSWRTDVYYNSVNNCYELLGIKYCHLKFYRGKYGIPKSIYDELKKEDEISSESVFKFSLYRHDRVRFEKDGEYIEALFGSKNESNKNYLELSPIDKNKWLSKENVKFFGEVAASGRFIKGLKPGIKVIKQSTDYMGHVYAIHQEKLKFVLSDA

SEQ ID NO: 437 - protein, 1347 aa, Finegoldia magna
MKSEKKYYIGLDVGTNSVGWAVTDEFYNILRAKGKDLWGVRLFEKAKTAADTRTFRSGRRRNDRKGMRLQILREIFEDEIKKVDKDFYDRLDESKFWAEDKKVSGKYSLFNDKNFSDKQYFEKFPTIFHLRKYLMEEHGKVDIRYYFLAINQMMKRRGHFLIDGQISHVTDDKPLKEQLILLINDLLKIELEEELMDSIFEILADVNEKRTDKKNNLKELIKGQDFNKQEGNILNSIFESIVTGKAKIKNIISDEDILEKIKEDNKEDFVLTGDSYEENLQYFEEVLQENITLFNTLKSTYDFVILQSILKGKSTLSDAQVERYDEHKKDLEILKKVIKKYDEDGKLFKQVFKEDNGNGYVSYIGYYLNKNKKITAKKKISNIEFTKYVKGILEKQCDCEDEAVKYLLGKIEQENFLLKQISSINSVIPHQIHLFELDKILENLAKNYPSFNNKKEEFTKIEKIRKTFTFRIPYYVGPLNDYHKNNGGNAWIFRNKGEKIRPWNFEKIVDLHKSEEEFIKRMLNQCTYLPEETVLPKSSILYSEYMVLNELNNLRIKGKPLDTDVKLKLIEELFKKKTKVTLKSIRDYMIRNNFADKEDFDNSEKNLEIVSNMKSYIDFNNILGDKFELEMVEDLIEKITIHTGNKTLLKKYIEETYPDLSSSQIQKIINLKYKDWGRLSRKLLDGIKGRNKTDDVNTVINFMRNSSDNLMQIIEGKNYSFNEYIDNLRKKYIPQEISYEVVENLYVSPSVKKMIWQVIRVTEEITKVMGYDPDKIFIEMAKSEEEKKTTISRKNKLLDLYKAIKKDERDSQYEKLLTGLNKLDESELRSKKLYLYYTQMGRDMYTGEKIDLDKLFDSTHYDKDHIIPQSMKKDDSIINNLVLVNKNANQTTKGNIYPVPSSIRNNPDIYNYWKYLMEKEFISKEKYNRLIRNTPLTNEELGVFINRQLVETRQSTKAIKELFEKFYQKSKIIPVKASLASDLRKDMNTLKSREVNDLHHAHDAFLNIVAGDVWNREFTSNPINYVNENREGDKVKYSLSKYFTRPRKSKGKVIWTPEKGRKLIVDTLNKPSVLISNESHVKKGELFNATISGKKDYKKGKIYLPLKKDDRLKDVSKYGGYKAINGAFFFLVEHTKSKKRIRSIELFPLHLLSKFYEDKNTVLDYAINVLQLQDPKIIIDKINYRTEIIIDNFSYLISTKSNDGSITVKPNEQMYWRVDEISNLKKIENKYKKDAILTEEDRKIMESYIDKIYQQFKAGKYKNRRTTDTIIEKYEIIDLDTLDNKQLYQLLVAFISLSYKTSNNAVDFTVIGLGTECGKPRITNLPDNTYLVYKSITGIYEKRIRIK

SEQ ID NO: 438 - protein, 1348 aa, Finegoldia magna; identical to SEQ ID NO: 236

SEQ ID NO: 439 - protein, 1516 aa, Flavobacteriaceae bacterium
MLKQQKDKIIGMNKKILGLDLGTNSIGWALVKQDLENKYGEIIGCGSRIIPMSQDVLGKFDAGISISQTAERTNYRSVRKLIQRNTLRRERLHRVLHQLDFLPKHYNDSIDFEKKLGQFKTDKETKLNYFVNQHGKHEFLFKDSFNEMVKEFKEEQPELFYIKNNGKETKIPYDWTIYYLRKKALSKKISKEELSWLVLNFNQKRGYYQLRGEIDEEKEKNKRYEKLYVSEVVKTNNTIKKTGEYLYDIYFDNGWKYEKQTTKPQDWLHKHKEFIITTTTLKNGETKRTFKTVDSEKDWIAIKSKTEQDIKESNKTVGAFIYDTLLKNPTQKIRGSLVKTIERKFYREEFEKILKEQIKHRPEINVNTAIGKENYTKCVTELYPRNEAHANNILTNDFNYLFTKDILFYQRPLKSKKSEIANCQYEYRTYIKKKEKTGKEERVKQPLKATPKSHPLFQEFRLWQFIHNLKIYIRETTVGNKPLFDVDITDTFFTSENDWATLFEYLNNKKEIEQKHVLEYLVSKKIISKSEKTDYRWNYVEDKKYPGNETRVDFINRLKKVENLNVDEFLTSELEFKLWHIIYSVTDKNEYEKALENFAIRQNIDKDSFVNSFKKFPPFKSDYGAYSTKAIKKLLPLMRLGKFWDGSEIPKVVVEKITDIKTRLTSVNYDESLFKKDEKKILETIVDDITPKQLLKSFVKLKGKNHLAGLNTYQACYLVYERHSESSDITQWENPDDIDSFLNHFKQHSLRNPIVEQVVTETLRTVRDIWKYYGNGSPNYFNEIHIELGREMKNPADKRKQMSAKINENENTNQRIKGILQELMNDGVQDIKPYSPSQQEILKIYEEGISQNPNVDYSKVSEDEITKIKKSNNPTLKEIQRYKLWLEQKYISPYTGKPIPLSELFTPAYQIEHIIPQSRYFDNSLSNKIICESEVNEDKSNKTAYEYLKTNGGSIVHGHHLLSLKEYEDHCQHYFKKNRTKLKNLLSEEIPEGFINRQLNDSRYISKLIKGLLSNIVREENEQEATSKNIVPVTGSITSKLKQDWGLNDKWNEIIAPRFKRLNKMTNSNDFGYFDEKINTFRIQVPDAISRGFNKKRIDHRHHTLDALVIACCTKKHIQYLNSLNNEIIKHELKPSILIKNAQGDYTKHFMLPWNNFPIDCKNAIENTIVSFKQNLRVINKTSNKYQSYKDENGNLRLGKDGKPKKGLTKQTKGNNWAVRKAMHEDTFYGEIVDGENKGKLKIKTLLDTSFDVKKIEDKVLDKSIRTILINYLKQDKYKNLSKPHEEAFSPNGIIEMNKNIISLNNNIPHKPIKRVTLKHEKGKKFSIKTLLDKKTKFAKSATGTNVFFCIYKNINGKIKYHTPSFEEIIEIQKQEFEIKYKSKLNVPETLFDKKESFELLFYLQPNDLVYLPNDEELKNRQLIDFNNLNKKQIKRIYKFTDGSGTTANFIPYQVAKVIFNLNKKEQAKSSFKYPIQNEFGVGSPQSKNQKSIEGILIKERCIKLKIDRLGNISKA

SEQ ID NO: 440 - protein, 1629 aa, Francisella cf.
MNFKILPIAIDLGVKNTGVFSAFYQKGTSLERLDNKNGKVYELSKDSYTLLMNNRTARRHQRRGIDRKQLVKRLFKLIWTEQLNLEWDKDTQQAISFLFNRRGFSFITDGYSPEYLNIVPEQVKAILMDIFDDYNGEDDLDSYLKLATEQESKISEIYNKLMQKILEFKLRKLCTDIKDDKVSTKTLKEITSYEFELLADYLANYSEILKTQKFSYTDKQGNLKELSYYHHDKYNIQEFLKRHATINIQILDTLLTDDLDIWNFNFEKFDFDKNEEKLQNQEDKDHIQAHLHHFVFAVNKIKSEMASGGRHRSQYFQEITNVLDENNHQEGYLKNFCENLHNKKYSNLSVKNLVNLIGNLSNLELKPLRKYFNDKIHAKADHWDEQKFTETYCHWILGEWRVGVKDQDKKDGAKYSYKDLCNELKQKVTKAGLVDFLLELDPCRTIPPYLDNNNRKPPKCQSLILNPKFLDNQYPNWQQYLQELKKLQSIQNYLESFETDLKVLKSSKDQPYFVEYRSSNQQIASGQRDYKDLDARILQFIFDRVKASDELLLNEIYFQAKKLKQKASSELEKLESSKKLDEVIANSQLSQILKSQHTNGIFEQGTFLHLVCKYYKQRQRARDSRLYIMPEYRYDKKLHKYNNTGRFDDDNQLLTYCNHKPRQKRYQLLNDLAGVLQVSPNFLKDKIGSDDDLFISKWLVEHIRGFKKACEDSLKIQKDNRGLLNHKINIARNTKGKCEKEIFNLICKIEGSEDKKGNYKHGLAYELGVLLFGEPNEASKPEFDRKIKKFNSIYSFAQIQQIAFAERKGNANTCAVCSADNAHRMQQIKITEPVEDNKDKIILSAKAQRLPAITTRIVDGAVKKMATILAKNIVDDNWQNIKQVLSAKHQLHIPIITESNAFEFEPALADVKGKSLKDRRKKALERISPENIFKDKNNRIKEFAKGISAYSGANLTDGDFDGAKEELDHIIPRSHKKYGTLNDEANLICVTRGDNKNKGNRIFCLRDLANNYKLKQFETTDDLEIEKKIADTIWDANKKDFKFGNYRSFINLTPQEQKAFRHALFLADENPIKQAVIRAINNRNRTFVNGTQRYFAEVLANNIYLRAKKENLNTDKISFDYFGIPTIGNGRGIAEIRQLYEKVDSDIQAYAKGDKPQASYSHLIDAMLAFCIAADEHRNDGSIGLEIDKNYSLYPLDKNTGEVFTKDIFSQIKITDNEFSDKKLVRKKATEGFNTHRQMTRDGIYAENYLPILIHKELDEVRKGYTWKNSEEIKIFKGKKYDIQQLNNLLYCLKFVDKPISIDIQISTLEELRNILTTNNIAATAEYYYINLKTQKLHEYYIENYNTALGYKKYTKEMEFLRSLAYRSERVKIKSIDDVKQVLDKDSNFIIGKITLPFKKEWQRLYREWQNITIKDDYEFLKSFFNVKSITKLHKKVRKDFSLPISTNEGKFLVKRKTWDNNFIYQILNDSDSRVDGTKPFIPAFDISKNEIVEAIIDSFTSKNIFWLPKNIELQKVDNKNIFAIDTSKWFEVETPSDLRDIGVATIQYKIDNNSRPKVRVKLDYVIDDDSKINYFTNHSLLKSRYPDKVLEILKQSTIIEFESSGFNKTIKEMLGMTLAGIYNETSNN

SEQ ID NO: 441 - protein, 1646 aa, Francisella cf.
MNIKILPIAIDLGAKNTGVFSAFYQKGTSLESLDNKNGKVYELSKDSYTLLMNNRTARRHQRRGIDRKQLVKRLFKLIWTKQLNLEWNKDTQQTISFLLNRRGFSFITDGYSPEYLNIAPEAVKAILMSILDDYNGEDDLDSYLQSATENDSKIDELYNKLLQKALEFKLRKLCIDIKEDKVTTKTLKELSNTEFKLLANYLVDYDRILRTQKFSYTDKQGNLRELNYYHHDKYNIQEFLKRNIIINDVILEKLTDDLDIWNLNFDKFDFEKNLEKLENQEDKDYLQTHLHHFVFAVNKIKSEMASGGRHRSQYFQEITNVLVENNHQEGYLKNFCENLHNKKYSNLSVKNLVNLIGNLSNLELKPLRKYFNDKIHAKADYWDEQKFAETYSDWILGEWRVGAKDKDKKDGAKYSYKNLCDELKQKVGINQDGIINQTKSDFVDFLLELDPCRTIPPYLDNNNRKPPKCQSLILNPKFLDNKYPNWQQYLQELKKLQTVQNYLGNFEIDLKDLKSSKEQPYFVKYKSLNQQIASGQRDYKDLDARVLQFIFDRVKASDELLLNEIYSHAKKLKQNTSSELEKLELCKKLDEVIANSQLSQILKSQHVNGIFEQGTFLHLVCKYYKQRQRARDSRLYIMPEYRYDKKLDKYNNTGRFDDDNQLLTYCNHKPRQKRYQLLNDLAGVLQVSPNFLKDKIGSDDDLFISKWLVEHIRGFKKACEDSLKIQKDNRGLLNHKINIARNTKGKCEKEIFNLICKIEGSEDKKGNYKHGLAYELGVLLFGEPNQASKLEFDRKIKKFNSIYSFAQIQQIAFAERKGNANTCAVCSADNAHRMQQIKVAKPVEGNKDNIILSAKAQRLPAIPTRIVDGAVKKIATILARNIVDDNWDNIKQALSNNQQLHVPIITESNAFEFEPALADIKGKSLKDKRKKALERIDPENVFKDKNNRIKEFAKGISAYSDANLANGDFDGAKEELDHIIPRSHKKYGTLNDEANLICVTREDNQNRGNKAVFLYDLKPNYKLKQFNTTDDLEIEKKIADTIWDASKQDFKFGNYRSFINLTPQEQIAFRHALFLADKNPIKKAVIRAIDNRNRTFVNGTQRYFAEVLANNIYLRAKKENLATNRITFDYFGIETTNSNGRGIADVRKLYEKVDSDIQAYAKGDKPQDSYSHLIDAMIAFCVAADEHKNEGSIGLKMGNQYGLFPTPDKYDENTGEIISWHNDDIFRKIKVSDNQFSDKKLVRKKATEGFNTHRQMTRDGIYGESYLPILIHKNLNEVRKGYNWENSEEIKIFKGKKYDIQQLNNLVYCLKFVDKPISIDIQITTLEELRNILETNNISTTAEYYYINLKTQKLHEYYIENYNTALGYKKYTKEMEFLRSLAYRTERVKIKSIDDVSMILAKDSNFKAGKIELPFKTEWQRLYLEWQNTTIKDNHEFLKSYFSVKNATKQHKKVRKDFSLPISTNEGKLLVKRKTWDNNFIYQILNDSDSRADGTKPFIPAFDISKNEIVETIIKSFTSKNIFWLPKNIELQKVDNKSIFAIDTSRWFEVETPKDLIEIGVSTIQYKIDNNSRPKVRVKLDYVMDDDSKINYFMNHSLLKSRYPDKVLEILKQSTIIEFESSGFNKTIKEMLGMTLAGIYNETSNN

SEQ ID NO: 442 - protein, 1629 aa, Francisella novicida
MNFKILPIAIDLGVKNTGVFSAFYQKGTSLERLDNKNGKVYELSKDSYTLLMNNRTARRHQRRGIDRKQLVKKLFKLIWTEQLNLEWDKDTQQAISFLFNRRGFSFITDGYSPEYLNIVPEQVKAILMDIFDDYNGEDDLDSYLKLATEQESKISEIYNKLMQKILEFKLRKLCTDIKDDKVSTKTLKEITSYEFELLADYLANYSESLKTQKFSYTDKQGNLKELSYYHHDKYNIQEFLKRHATINDEILDTLLTDDLDIWNFNFEKFDFDKNEEKLQNQEDKDHTQAHLHHFVFAVNKIKSEMASGGRHRGQYFQEITNVLDENNHQEGYLKNFCENLHNKKYSNLSVKNLVNLIGNLSNLELKPLRKYFNDKIHAKADHWDEQKFTETYCHWILGEWRVGLKDQDKKEGAKYSYKDLCNELKQKVTNAGLIDFLLELDPCRTIPPYLDNNNRKPPKCQSLILNPKFLDNQYPNWQQYLQELKKLQIIQDYLESFETDLKVLKSSKDQPYFVEYKSSNQQIASGQRDYKDLDARILQFIFDRVKASDELLLNEIYFQAKKLKQKASSELEKLESSKKLDEVIANSQLSKILKSQHTNGIFEQGTFLHLVCKYYKQRQRARDSRLYIMPEYRYDKKLDKYNNTGRFDDDNQLLTYCNHKPRQKRYQLLNDLAGVLQVSPNFLKDKIGSDDDLFISKWLVEHIRGFKKACEDSLKIQKDNRGLLNHKINIARNTKGKCEKEIFNLICKIEGSEDKKGNYKHGLAYELGVLLFGEPNEASKPEFDRKIKKFNSIYSFAQIQQIAFAERKGNANTCAVCSADNAHRMQQIKITEPVEDNKDKIILSAKAQRLPAIPTRIVDGAVKKMATILAKNIVDDNWQNIKQVLSAKHQLHIPIITESNAFEFEPALADVKGKSLKDRRKKALERISPENIFKDKNNRIKEFAKGISAYSGANLTDGDFDGAKEELDHIIPRSHKKYGTLNDEANLICVTRDDNKNKGNRIFCLHDLANNYKLKQFETTDDLEIEKKIADTIWDASKKDFKFGNYRSFINLTPQEQKAFRHALFLADENPIKQAVIRAINNRNRTFVNGTQRYFAEVLANNIYLRAKKENLNTDKISFDYFGIPTIGNGRGIAEIRQLYEKVDSDIQVYAKGDKPQASYSHLIDAMLAFCIAADEHRNDGSIGLEIDKNYSLYPLDKNTGEVFTKDIFSQIKITDNEFSDKKLVRKKATEGFNTHRQMTRDGIYAENYLPILIHKELDEVRKGYTWKNSEEIKIFKGKKYDIQQLNNLLYCLKFVDKPISIDIQISTLEELRNILTTNNIAATAEYYYINLKTQKLHEYYIENYNTALGYKKYTKEMEFLRSLAYRSERVKIKSIDDVKQVLDKDSNFIIGKITLPFKKEWQRLYREWQNTTIKDDYEFLKSFFNVKSITKLHKKVRKDFSLPISTNEGKFLVKRKTWDNNFIYQILNDSDSRVDGTKPFIPAFDISKNEIVEAIIDSFTSKNIFWLPKNIELQKVDNKNIFAIDTSKWFEVETPSDLRDIGVATIQYKIDNNSRPKVRVKLDYVIDDDSKINYFTNHSLLKSRYPDKVLEILKQSTIIEFESSGFNKTIKEMLGMTLAGIYNETSNN

SEQ ID NO: 443 - protein, 1629 aa, Francisella novicida
MNFKILPIAIDLGVKNTGVFSAFYQKGTSLERLDNKNGKVYELSKDSYTLLMNNRTARRHQRRGIDRKQLVKRLFKLIWTEQLNLEWDKDTQQAISFLFNRRGFSFITDGYSPEYLNIVPEQVKAILMDIFDDYNGEDDLDSYLKLATEQESKISEIYNKLMQKILEFKLMKLCTDIKDDKVSTKTLKEITSYEFELLADYLANYSESLKTQKFSYTDKQGNLKELSYYHHDKYNIQEFLKRHATINDRILDTLLTDDLDIWNFNFEKFDFDKNEEKLQNQEDKDHIQAHLHHFVFAVNKIKSEMASGGRHRSQYFQEITNVLDENNHQEGYLKNFCENLHNKKYSNLSVKNLVNLIGNLSNLELKPLRKYFNDKIHAKADHWDEQKFTETYCHWILGEWRVGVKDQDKKDGAKYSYKDLCNELKQKVTKAGLVDFLLELDPCRTIPPYLDNNNRKPPKCQSLILNPKFLDNQYPNWQQYLQELKKLQSIQNYLDSFETDLKVLKSSKDQPYFVEYKSSNQQIASGQRDYKDLDARILQFIFDRVKASDELLLNEIYFQAKKLKQKASSELEKLESSKKLDEVIANSQLSQILKSQHTNGIFEQGTFLHLVCKYYKQRQRARDSRLYIMPEYRYDKKLHKYNNTGRFDDDNQLLTYCNHKPRQKRYQLLNDLAGVLQVSPNFLKDKIGSDDDLFISKWLVEHIRGFKKACEDSLKIQKDNRGLLNHKINIARNTKGKCEKEIFNLICKIEGSEDKKGNYKHGLAYELGVLLFGEPNEASKPEFDRKIKKFNSIYSFAQIQQIAFAERKGNANTCAVCSADNAHRMQQIKITEPVEDNKDKIILSAKAQRLPAIPTRIVDGAVKKMATILAKNIVDDNWQNIKQVLSAKHQLHIPIITESNAFEFEPALADVKGKSLKDRRKKALERISPENIFKDKNNRIKEFAKGISAYSGANLTDGDFDGAKEELDHIIPRSHKKYGTLNDEANLICVTRGDNKNKGNRIFCLRDLADNYKLKQFETTDDLEIEKKIADTIWDANKKDFKFGNYRSFINLTPQEQKAFRHALFLADENPIKQAVIRAINNRNRTFVNGTQRYFAEVLANNIYLRAKKENLNTDKISFDYFGIPTIGNGRGIAEIRQLYEKVDSDIQAYAKGDKPQASYSHLIDAMLAFCIAADEHRNDGSIGLEIDKNYSLYPLDKNTGEVFTKDIFSQIKITDNEFSDKKLVRKKAIEGFNTHRQMTRDGIYAENYLPILIHKELNEVRKGYTWKNSEEIKIFKGKKYDIQQLNNLVYCLKFVDKPISIDIQISTLEELRNILTTNNIAATAEYYYINLKTQKLHEYYIENYNTALGYKKYSKEMEFLRSLAYRSERVKIKSIDDVKQVLDKDSNFIIGKITLPFKKEWQRLYREWQNTTIKDDYEFLKSFFNVKSITKLHKKVRKDFSLPISTNEGKFLVKRKTWDNNFIYQILNDSDSRVDGTKPFIPAFDISKNEIVEAIIDSFTSKNIFWLPKNIELQKVDNKNIFAIDTSKWFEVETPSDLRDIGVATIQYKIDNNSRPKVRVKLDYVIDDDSKINYFTNHSLLKSRYPDKVLEILKQSTTIEFESSGFNKTIKEMLGMTLAGIYNETSNN

SEQ ID NO: 444 - protein, 244 aa, Francisella tularensis
ARKQNSEIYNKLMQKILEFKLRKLCTDIKDDKVSTKTLKEITSYEFELLADYLANYSESLKTQKFSYTDKQGNLKELSYYHHDKYNIQEFLKRHATINDEILDTLLTDDFDIWNFNFEKFDFDKNEEKLQNQEDKDHTQAYLHHFVFAVNKIKSEMASGGRHRSQYFQEITNVLDENNHQEGYLKNFCENLHNKKYSNLSVKNLVNLVGNLSNLELKPLRKYFNDKNLIIGMSKSLQKLIATGY

SEQ ID NO: 445 - protein, 501 aa, Francisella tularensis
MEIEKKIADTIWDASKQDFKFGNYRSFINLTPQEQKAFRYALFLADENSIKQAVIRAINNRNRTFVNGTQRYFAEVLANNIYLRAKKENLNTDKISFDYFGIPTIGNGRGIADIRQLYEKVDSDIQAYAKGDKPQASYSHLIDAMIAFCVAADEHRNDGSIGLEIDKNYSLYLLDKNTGEVFTKDIFSQIKITDNEFSDKKLVRKKATEGFNTHRQMTRDGIYAENYLPILIHKELDEVRKGYTWGNSEELKIHKGKKYNIQQLNNIVYCLKFIDKSISIDIQISTLEELRNILTTNNIAATAEYYYINLKNQKLHEYYIENYNTALDYKKYSKEMEFLRSLAYRSERVKIKSIDDVKQVLDKDSNFIIGKITLPFKKEWQRLYLEWQNTTIKDDYEFLKSFFNVKSITKLHKKVRKDFSLPISTNEGKFLVKRKTWDNNFIYQILNDSDSRVDGTKPFIPAFDISKNEIVEAIIDSFTSKNIFWLPKNIELQNVDKIFLL

SEQ ID NO: 446 - protein, 158 aa, Francisella tularensis
MIDFLLELDPCITIPPYLDNNNRKPPKCQSLILNPKFLDNQYPNWQQYLQELKKLQSIQDYLDSFETDLKDLKSSKDQPYFVEYKSSNQQMASGQRDYKDLDARILQFIFDRVKASDELLLNEIYFQAKKLKQKASSELEKLESSKKLDEVIANSQLS

SEQ ID NO: 447 - protein, 878 aa, Francisella tularensis
MLNDLAGVLQVSRNQLLSSVEEWFQQAQRVGEISKSQDEQIFEWLKSFKIASYCKAAVEMQKQYRGTLKNAIQTAIFRQSENINKNKNKNKNTGNQQQALSENSKDVKSLTADEKKLLKLIENIAKASQKIGESLGLNDKQIKKFNSIYNFAQIQQIAFAERKGNANTCAVYSADNAHRMQQIKITELVEDNKDNIILSAKAQRLPAIPTRIVDGAVKKMATILAKNIVDDNWQNIKQVLSAKHQLHIPIITESNAFEFEPALADVKGKSLKDRRKKALERISPENIFKDKNNRIKEFAKGISAYSGANLTDGDFDGAKEELDHIIPRSYKKYGTLNDEVNLICVTRDDNKNKGKRIFCLNDLANNYKLKQFETTDDLEIEKKIADTIWDASKQDFKFGNYRSFINLIPQEQKAFRYALFLADENSIKQAVIRAINNRNRTFVNGTQRYFAEVLANNIYLRAKKENLNTDKISFDYFGIPTIGNGRGIADIRQLYEKVDSDIQAYAKGDKPQASYSHLIDAMIAFCVAADEHRNDGSIGLEIDKNYSLYPLDKNTGEVFTKDIFSQIKITDNEFSDKKLVRKKATEGFNTHRQMTRDGIYAENYLPILIHKELDEVRKGYTWGNSEELKIHKGKKYNIQQLNNIVYCLKFIDKSISIDIQISTLEELRNILTTNNIAATAEYYYINLKNQKLHEYYIENYNTALDYKKYSKEMEFLRSLAYRSERVKIKSIDDVKQVLDKDSNFIIGKITLPFKKEWQRLYLEWQNTTIKDDYEFLKSFFNVKSINKLHKKVRKDFSLPISTNEGKFLVKRKTWDNNFIYQILNDSDSRVDGTKPFIPAFDISKNEIVEAIIDSFTSKNIFWLPKNIELQKVDKIFLL

SEQ ID NO: 448 - protein, 292 aa, Francisella tularensis
MLNDLAGVLQVSRNQLLSSVEEWFQQAQRVGEISKSQDEQIFEWLKSFKIASYCKAAVEMQKQYRGTLKNAIQTAIFRQSENINKNKNKNTGNQQQALSENSKDVKSLTADEKKLLKLIENIAKASQKIGESLGLNDKQIKKFNSIYNFAQIQQIAFAERKGNANTCAVYSADNAHRMQQIKITELVEDNKDNIILSAKAQRLPAIPTRIVDGAVKKMVTILAKNIVDDNWQNIKQVLSAKHQLHIPIITESNAFEFEPALADVKGKSLKDRRKKALERISPENIFKDKNIC

SEQ ID NO: 449 - protein, 53 aa, Francisella tularensis
MNHSLLKSRYPDKVLEILKQSTIIEFESSGFNKTIKEMLGMTLAGIYNETSNN

SEQ ID NO: 450 - protein, 393 aa, Francisella tularensis
MNVKILPIAIDLDVKNTGVFSAFYQKGTSLEKLDNKNGKVYELSKDSYTLLMNNRTAQRHQRRGIDRKQLVKRLFKLVWTEQLNLEWDKDTQQAISFLFNRRGFSFITDGYSTEYLNIVPEQVKAILMDIFDDYNGEDDLDSYLKLATEQESKISEIYNKLMQKILEFKLRKLCTDIKDDKVSTKTLKEITSYEFELLADYLANYSESLKTQKFSYTDKQGNLKELSYYHHDKYNIQEFLKRHATINDEILDTLLTDDFDIWNFNFEKFDFDKNEEKLQNQEDKDHTQAYLHHFVFAVNKIKSEMASGGRHRSQYFQEITNVLDENNHQEGYLKNFCENLHNKKYSNLSVKNLVNLVGNLSNLELKPLRKYFNDKNLIIGMSKSLQKLIATGY

SEQ ID NO: 451 - protein, 1629 aa, Francisella tularensis
MNVKILPIAIDLGVKNTGVFSAFYQKGTSLERLDNKNGKVYELSKDSYTLLMNNRTARRHQRRGIDRKQLVKRLFKLIWTEQLNLEWDKDTQQAISFLFNRRGFSFITDGYSPEYLNIVPEQVKAILMDIFDDYNGEDDLDSYLKLATEQESKISEIYNKLMQKILEFKLRKLCTDIKDDKVSTKTLKEITSYEFELLADYLANYSEILKTQKFSYTDKQGNLKELSYYHHDKYNIQEFLKRHATINDEILDTLLTDDLDIWNFNFEKFDFDKNEEKLQNQEDKDHTQAHLHHFVFAVNKIKSEMASGGRHRGQYFQEITNVLDENNHQEGYLKNFCENLHNKKYSNLSVKNLVNLIGNLSNLELKPLRKYFNDKIHAKADHWDEQKFTETYCHWILGEWRVGVKDQDKKDGAKYSYKDLCNELKQKVTKAGLVDFLLELDPCRTIPPYLDNNNRKPPKCQSLILNPKFLDNQYPNWQQYLQELKKLQSIQNYLESFETDLKVLKSSKDQPYFVEYKSSNQQIASGQRDYKDLDARILQFIFDRVKASDELLLNEIYFQAKKLKQKASSELEKLESSKKLDEVIANSQLSQILKSQHTNGIFEQGTFLHLVCKYYKQRQRARDSRLYIMPEYRYDKKLDKYNNTGRFDDDNQLLTYCNHKPRQKRYQLLNDLAGVLQVSPNFLKDKIGSDDDLFISKWLVEHIRGFKKACEDSLKIQKDNRGLLNHKINIARNTKGKCEKEIFNLICKIEGSEDKKGNYKHGLAYELGVLLFGEPNEASKPEFDRKIKKFNSIYSFAQIQQIAFAERKGNANTCAVCSADNAHRMQQIKITEPVEDNKDKIILSAKAQRLPAIPTRIVDGAVKKMATILAKNIVDDNWQNIKQVLSAKHQLHIPIITESNAFEFEPALADVKGKSIKDRRKKALERISPENIFKDKNNRIKEFAKGISAYSGDNLASGDFDGAKEELDHIIPRSHKKYGTLNDEANLICVTRDDNKNKGNRIFCLHDLANNYKLKQFETTDDLEIEKKIADTIWDASKKDFKFGNYRSFINLTPQEQKAFRHALFLADENPIKQAVIRAINNRNRTFVNGTQRYFAEVLANNIYLRAKKENLNTDKISFDYFGIPTIGNGRGIVEIRQLYEKVDSDIQAYAKGDKPQASYSHLIDAMLAFCIAADEHRNDGSIGLEIDKNYSLYPLDKNTGEVFTKDIFSQIKITNNEFSDKKLVRKKATEGFNTHRQMTRDGIYAENYLPILIHKELDEVRKGYTWGNSEELKIHKGKKYDIQQLNNLVYCLKFIDKSISIDIQISTLEELRNILTTNNIATTAEYYYINLKTQKLHEYYIENYNTALGYKKYTKEMEFLRSLAYRSERVKIKSIDDVKQVLDKDSNFIIGKITLPFKKEWQRLYREWQNTTIKDDYEFLKSFFNVKSITKLHKKVRKDFSLPISTNEGKFLVKRKTWDNNFIYQILNDSDSRVDGTKPFIPAFDISKNEIVEAIIDSFTSKNIFWLPKNIELQKVDNKNIFAIDTSKWFEVETPSDLRDIGVATIQYKIDNNSRPKVRVKLDYVIDDDSKINYFTNHSLLKSRYPDKVLEILKQSTIIEFESSGFNKTIKEMLGMTLAGIYNETSNN

SEQ ID NO: 452 - protein, 285 aa, Francisella tularensis
MTRDGIYAENYLPILIHKELDEVRKGYTWGNSEELKIHKGKKYNIQQLNNIVYCLKFIDKSISIDIQISTLEELRNILTTNNIAATAEYYYINLKNQKLHEYYIENYNTALDYKKYSKEMEFLRSLAYRSERVKIKSIDDVKQVLDKDSNFIIGKITLPFKKEWQRLYLEWQNTTIKDDYEFLKSFFNVKSITKLHKKVRKDFSLPISTNEGKFLVKRKTWDNNFIYQILNDSDSRVDGTKPFIPAFDISKNEIVEAIIDSFTSKNIFWLPKNIELQKVDKIFLL

SEQ ID NO: 453 - protein, 1323 aa, Fructobacillus fructosus
MVYDVGLDIGTGSVGWVALDENGKLARAKGKNLVGVRLFDTAQTAADRRGFRTTRRRLSRRKWRLRLLDELFSAEINEIDSSFFQRLKYSYVHPKDEENKAHYYGGYLFPTEEETKKFHRSYPTIYHLRQELMAQPNKRFDIREIYLAIHHLVKYRGHFLSSQEKITIGSTYNPEDLANAIEVYADEKGLSWELNNPEQLTEIISGEAGYGLNKSMKADEALKLFEFDNNQDKVAIKTLLAGLTGNQIDFAKLFGKDISDKDEAKLWKLKLDDEALEEKSQTILSQLTDEEIELFHAVVQAYDGFVLIGLLNGADSVSAAMVQLYDQHREDRKLLKSLAQKAGLKHKRFSEIYEQLALATDEATIKNGISTARELVEESNLSKEVKEDTLRRLDENEFLPKQRTKANSVIPHQLHLAELQKILQNQGQYYPFLLDTFEKEDGQDNKIEELLRFRIPYYVGPLVTKKDVEHAGGDADNHWVERNEGFEKSRVTPWNFDKVFNRDKAARDFIERLTGNDTYLIGEKTLPQNSLRYQLFTVLNELNNVRVNGKKFDSKTKADLINDLFKARKTVSLSALKDYLKAQGKGDVTITGLADESKFNSSLSSYNDLKKTFDAEYLENEDNQETLEKIIEIQTVFEDSKIASRELSKLPLDDDQVKKLSQTHYTGWGRLSEKLLDSKIIDERGQKVSILDKLKSTSQNFMSIINNDKYGVQAWITEQNTGSSKLTFDEKVNELTTSPANKRGIKQSFAVLNDIKKAMKEEPRRVYLEFAREDQTSVRSVPRYNQLKEKYQSKSLSEEAKVLKKTLDGNKNKMSDDRYFLYFQQQGKDMYTGRPINFERLSQDYDIDHIIPQAFTKDDSLDNRVLVSRPENARKSDSFAYTDEVQKQDGSLWTSLLKSGFINRKKYERLTKAGKYLDGQKTGFIARQLVETRQIIKNVASLIEGEYENSKAVAIRSEITADMRLLVGIKKHREINSFHHAFDALLITAAGQYMQNRYPDRDSTNVYNEFDRYTNDYLKNLRQLSSRDEVRRLKSFGFVVGTMRKGNEDWSEENTSYLRKVMMFKNILTTKKTEKDRGPLNKETIFSPKSGKKLIPLNSKRSDTALYGGYSNVYSAYMTLVRANGKNLLIKIPISIANQIEVGNLKINDYIVNNPAIKKFEKILISKLPLGQLVNEDGNLIYLASNEYRHNAKQLWLSTTDADKIASISENSSDEELLEAYDILTSENVKNRFPFFKKDIDKLSQVRDEFLDSDKRIAVIQTILRGLQIDAAYQAPVKIISKKVSDWHKLQQSGGIKLSDNSEMIYQSATGIFETRVKISDLL

SEQ ID NO: 454 - protein, 1367 aa, Fusobacterium sp.
MKKQKFSDYYLGFDIGTNSVGWCVTDLDYNVLRFNKKDMWGSRLFDEAKTAAERRVQRNSRRRLKRRKWRLNLLEEIFSDEIMKIDSNFFRRLKESSLWLEDKNSKEKFTLFNDDNYKDYDFYKQYPTIFHLRDELIKNPEKKDIRLIYLALHSIFKSRGHFLFEGQNLKEIKNFETLYNNLISFLEDNGINKSIDKDNIKKLEKIICDSGKGLKDKEKEFKEIFNSDKQLVAIFKLSVGSSVSLNDLFDTDEYKKEEVEKEKISFREQIYEDDKPIYYSILGEKIELLDIAKSFYDFMVLNNILSDSNYISEAKVKLYEEHKKDLKNLKYIIRKYNKENYDKLFKDKNENNYPAYIGLNKEKGKKEVVEKSGLKIDDLIKVIKGYLPKPERIEEKDKTIFNEILNKIELKTILPKQRISDNGTLPYQIHEVELEKILENQSKYYDFLNYEENGVSTKDKLLKTFKFRIPYYVGPLNSYHKDKGGNSWIVRKEEGKILPWNFEQKVDIEKSAEEFIKRMTNKCTYLNGEDVIPKDSFLYSEYIILNELNKVQVNDEFLNEENKRKIIDELFKENKKVSEKKFKEYLLVNQIANRTVELKGIKDSFNSNYVSYIKFKDIFGEKLNLDIYKEISEKSILWKCLYGDDKKIFEKKIKNEYGDILNKDEIKKINSFKFNTWGRLSEKLLTGIEFINLETGECYSSVMEALRRTNYNLMELLSSKFTLQESIDNGNKEMNEVSYRDLIEESYVSPSLKRAILQTLKIYEEIKKITGRVPKKVFIEMARGGDETMKNKKIPARQEQLKKLYDSCGNDIANFSIDIKKMKSSLSSYDNNSLRQKKLYLYYLQFGKCMYTGREIDLDRLLQNNDTYDIDHIYPRSKVIKDDSFDNLVLVLKNENAEKSNEYPVKKEIQEKMKSFWRFLKEKNFISDEKYKRLTGKDDFELRGFMARQLVNVRQTTKEVGKILQQIEPEIKIVYSKAEIASSFREMFDFIKVRELNDTHHAKDAYLNIVAGNVYNTKFTEKPYRYLQEIKENYDVKKIYNYDIKNAWDKENSLEIVKKNMKKNTVNITRFIKEEKGQLFDLNPIKKGETSNEIISIKPKLYNGKEEKLNEKYGYYKSLNPAYFLYVEHKEKNKRIKSFERVNLVDVNNIKDEKSLVKYLIENKKLVEPRLIKKVYKRQVILINDYPYSIVALDSNKLMDFENLKPLFLENKYEKILKNVIKFLEDNQGKSEENYKFIYLKKKDRYEKNETLESVKDRYNLEFNEMYDKFLEKLDSKDYKNYINNKKYKNLLDVKEKFIKLNLFDKAFTLKSFLDLFNRKTMADFSKVGLTKYLGKIQKISSNVLSKNELYLLEESVTGLFVKKIKL

SEQ ID NO: 455 - protein, 1367 aa, Fusobacterium sp.
MKKQKFSDYYLGFDIGTNSVGWCVTDLDYNVLRFNKKDMWGSRLFDEAKTAAERRVQRNSRRRLKRRKWRLNLLEEIFSDEIMKIDSNFFRRLKESSLWLEDKNSKEKFTLFNDDNYKDYDFYKQYPTIFHLRDELIKNPEKKDIRLIYLALHSIFKSRGHFLFEGQNLKEIKNFETLYNNLISFLEDNGINKSIDKDNIKKLEKIICDSGKGLKDKEKEFKEIFNSDKQLVAIFKLSVGSSVSLNDLFDTDEYKKEEVEKEKISFREQIYEDDKPIYYSILGEKIELLDIAKSFYDFMVLNNILSDSNYISEAKVKLYEEHKKDLKNLKYIIRKYNKENYDKLFKDKNENNYPAYIGLNKEKGKKEVVEKSGLKIDDLIKVIKGYLPKPERIEEKDKIIFNEILNKIELKTILPKQRISDNGTLPYQIHEVELEKILENQSKYYDFLNYEENGVSTKDKLLKTFKFRIPYYVGPLNSYHKDKGGNSWIVRKEEGKILPWNFEQKVDIEKSAEEFIKRMTNKCTYLNGEDVIPKDSFLYSEYIILNELNKVQVNDEFLNEENKRKIIDELFKENKKVSEKKFKEYLLVNQIANRTVELKGIKDSFNSNYVSYIKFKDIFGEKLNLDIYKEISEKSILWKCLYGDDKKIFEKKIKNEYGDILNKDEIKKINSFKFNTWGRLSEKLLTGIEFINLETGECYSSVMEALRRTNYNLMELLSSKFTLQESIDNGNKEMNEVSYRDLIEESYVSPSLKRAILQTLKIYEEIKKITGRVPKKVFIEMARGGDETMKNKKIPARQEQLKKLYDSCGNDIANFSIDIKKMKSSLSSYDNNSLRQKKLYLYYLQFGKCMYTGREIDLDRLLQNNDTYDIDHIYPRSKVIKDDSFDNLVLVLKNENAEKSNEYPVKKEIQEKMKSFWRFLKEKNFISDEKYKRLTGKDDFELRGFMARQLVNVRQTTKEVGKILQQIEPEIKIVYSKAEIASSFREMFDFIKVRELNDTHHAKDAYLNIVAGNVYNTKFTEKPYRYLQEIKENYDVKKIYNYDIKNAWDKENSLEIVKKNMKKNTVNITRFIKEEKGQLFDLNPIKKGETSNEIISIKPKLYNGKEEKLNEKYGYYKSLNPAYFLYVEHKEKNKRIKSFERVNLVDVNNIKDEKSLVKYLIENKKLVEPRLIKKVYKRQVILINDYPYSIVALDSNKLMDFENLKPLFLENKYEKILKNVIKFLEDNQGKSEENYKFIYLKKKDRYEKNETLESVKDRYNLEFNEMYDKFLEKLDSKDYKNYINNKKYKNLLDVKEKFIKLNLFDKAFTLKSFLDLFNRKTMADFSKVGLTKYLGKIQKISSNVLSKNELYLLEESVTGLFVKKIKL

SEQ ID NO: 456 - protein, 1367 aa, Fusobacterium sp.
MKKQQFSDYYLGFDIGTNSVGWCVTDFNYNVLRFNKKDMWGSRLFDEAKTAAERRVQRNSRRRLKRRKWRLNLLEEIFSDEILKIDSNFFRRLKESSLWLEDKSSKEKFTLFNDDNYKDYDFYKQYPTIFHLRNELIKNPEKKDIRLVYLALHSIFKSRGHFLFEGQNLKDIKNFETLYNNLMAFLEDNDIYKNIDSSYIGNLENIICDSKKGLKDKEKEFKEIFNSDKQLVGFFKLSVGSSVSLNDLFDTDEYKKGEVEKEKISFREQIYEDDKPIYYSILGEKIEFLDIAKSFYDFMVLNNILADSQYISEAKVKLYDEHKRDLKNLKYIIRKYNKENYDKLFKDKNESNYSAYIGLNKEKGKKEVIEKSRLKIDDFAKIIKGYLPKAEKIDEKDRSIFNEILDKIELKTILPKQRISDNGTLPYQIHEAELEKILENQAKYYDFLNHEENGISTKDKLLMTFKFRIPYYVGPLNSYHKNKGGNSWIVRKEEGKILPWNFEQKVDIEKSAEEFIKRMTNKCTYLNGEDVIPKDSFLYSEYIILNELNKVQVNDEFLNKEIKKKIIEDLFKKSKKISEKNFREYLLVNQITNKTVELKGVKDAFNSNYVSYIKFKDIFGDKLNLDIYKEISEKSILWKCLYGDDKKIFEKKIKSVYGDILTKDEIKKINSFKFNTWGRLSEKLLTEIEFIDLETGECYSSVMDALRRTNYNLMELLSSKFTLQENIDNENKEVSEFSYRDLVEESYVSPSLKRAILQTLKIYEEIRKITGRIPKKVFIEMARGGDETMKNKKIPARQEQLKKLYDSCGKDISNFSIDIKEMKNSLNSYDNNSLRQKKLYLYYLQFGKCMYTGKEIDLNRLLQNNDTYDIDHIYPRSKVIKDDSFDNLVLVLKNENAEKSNEYPLKKEIQEKMKSFWKFLKEKNFISDEKYKRLTGKDEFELRGFMARQLVNVRQTTKEAGKILQQIEPEIKIVYSKAEIASSFREMFDFIKVRELNDTHHAKDAYLNIVAGNVYNTKFTEKPYRYLQEIKENYDVKKIYNYDIKNAWDKEKSLEIVKKNMEKNTVNITRFIKEEKGQLFDLNPIRKGETSNEIIAIKPKFYEGSTEKLNEKYGYYKSLNPAYFIYVEHKEKNKIIRSFERVNLVDVNKIKDEKSLIKYLIENKGLIEPKVIKKVYKRQVILINNFPYSIVALDSNKLMDFENLKPLFLERKYEKILKNAIKFLEDNQGKTEEYYKFLYLKKKDRNEKNETIDSVKERYNIEFNEMYDKFLEKLDSKDYKNYINNKKYSELVNVKEKFIKLNLFDKAFTLKSFLDLFNRKTMADFSKVGLTKYLGKIQKISSNVLSKNELHLLEESVTGLFVKKIKL

SEQ ID NO: 457 - protein, 1391 aa, Galbibacter sp.
MKTILGLDLGTNSIGWALVKEAENENEVSDIIKLGVRVNPLTVDELTNFEGGKAYSNNAERTLKRGARRNLQRYKLRRENLIEILLKNGLINKDTALTEVGKETTHQTLKLRSKSANEKVSLEDLAKILLSINKKRGYKSSRKVNAEDDGVAIDGMEVAKLLYDENMTPGEYVLRLLESGKKHLPDFYRSDLQEEFNLVWKKQSEFYPLILTKELFFELHGKNKSQTWAICKEPLGIVGVKLKGSAKEQKFARYRLRKEALTQQIELEHLAIVLQDINNDSNKSSGYLGAISDRSKELFFNKETVGQYQYKQLQKDPNTSLKNQVFYRQDYLDEFEVIWRNQAKFYPQLTNELKQEIRDVVIFYQRKLKSQKNLISFCQFESTQQNYVEKETGKTKIRTIGRRVIPRSSPLFQEFKIWQSLNNLKFVNSESNQIIQFIELEDDVKKVVFDELNLRGDLKPNQVLKILSKYMKIGKLTQWKCNLEEIEGNRTNSALYNVFQMIAEEEGYGFNWGKKSALEIKSELKAIFSSIGINDSILDFDFSKKLDQQLSYQLWHLLYSAEEGNSKITEEDKFTYGNTGVALKKKLHLKFGFKPEYSTLISNLRFTSDYGNLSSKAISKILPFLRDGSDYSKACQYAGYNHSNSLSADELDNRELKPKLELLKKNSLRNPVVEKILNQMVNVVNQVIDNYGKPDEVRIELARELKKSAKERSQMTKNISDATRRNAEIKKYLSKEFGIPNPTKGDVIRYRLWEELASNGYKDLFRDKYIPKEKLFSNEIDIEHIIPKALLFDDSFSNKTLAFKVDNLKKADRTAFDFMSTDFSKDVDSYIGRIETLHKDGKISSSKYKKLMIPKSKLVDGFIERDLRNTQYIAKQARKMLLEVFKTVVPTTGKITDKLREDWDLINVMKELNFPKYKALGLTKKIERFDVGSEKIKSINVIEGWSKRNDHRHHAMDALAVAFTTHNHIQYLNYLNARKDIHHEMHGTIKSIENQIIGKDVMGKRRFIPPISDLRMKAKLQIESILISFKNKNKVVTWSVNKTKLKGKDNYNKRRQLTPRGQLHKETVYGKIKLIDPKPLKLNNKFTLVRASMIVDKVHREIVLQHLSKYDNNSEVAFDSKTIKIDPILIEGIGLKEVVCYEDVFKIRKKISGDNFKNEKHLEKVIDEKVKQILKDRVIKFQGNFKEAFSNLEENPIWLNKSKGIAVKSVAIKGVNNAESLHEGKDHFGDQILDKNKKQIPVDFVSTGNNHHVGIYEDKDGNLQERVVSFFEAVTRVNEGLPIIDKTYNSDIGWKFKFTMKQNEMFVFPSDDFDPNEFDLTDGKNAAKISPNLYRVQKIATKNYMFRHHLETVVTNDLEFTYKSIRSTGWLRNLVKVRINHLGEIVYVGEY

SEQ ID NO: 458 - protein, 1186 aa, Gardnerella vaginalis
MEGNISYAIGIDVGLNSVGLAAIRLDDYGEPIRILKAMSVIHDAGIDPNGAKESDTRKAISGVARRVRRLYRQRRRRLQKLDFLLQSLGWPVVENKDLDFSDSFIPWIFRAKLADEYIADEEQRKQMLSVAIRHIARHRGWRNPYQSIKSMMQETEYSEFYNELLKNIEKLAPGVGCEGSTPAQLVRDYLLSQQGKASRRLRITTGGRRKNHPHSLDPVLPRKLMQSDNMLEILNIFNVQHIDDKYVREQIINAVFYAESPRGSAENRVGKDAITGKGKRALKASLAFQKYRIISTISNLRIRENSKERCLTIEEKQNVYKLLTTSIDKSSKRKSAEAPLYTWIDVADCLGIERYKLRGVGSQIGDGESVGNRPPMLNSELAILYANNKSLGQSLITWWLASNRTQEDKEALIEILSNTVDIEAIHDNPEYQDKYGSAIAFIDSMNETEIAALENISLPDGRAAYSLETLDELNKQMLETDDDLFEARKKLFNLPNNWRPAEAPIAEPTGNPSVDRVLKIVHRFLISAKNRWGNPERINIEHVRSGFQSKKMANSYKELLDKRTEGKENLKAMMRNSLHLGTSDSISDADIRRYEAVQRQNGQCLYCGSEITYHTCELDHIVPRKGPGSTNTRENLVATCSSCNAQKCNTPFATWCEQSTYCKNHDISADSAINRVRAFIFPPNSYDKRGANQFKKEVIARLKQKVGDEAFDNRSIESVAWMANELHRRIDWYYNSQNYQTNNGISDISNKAQTNVGVYAGSLTAIARRMSGIDGKLEFFDGRRKTRFDRRHHAVDASVIAMMTPGIAQILAIKCNLRETQLLQGNKVVPGGIDWKEYPTANDQGYQQYANWSVRMNALLKLLNEEMRADRIAVVNSIRLRYSNSSVHQYEVNALLKLHVGDEIDSETIRRSSTPALYCALTRNPDYDVNNGFPENPGRTILLHNKKLNADDSITFFKAQAVQLFVREGSAKIGNSIHHLRIYEYFEKLKSGKIKKSYGMIRVFQNDLHRHIHEDLFSCDLPEQSISMRYADTKVAHAVQTGNANYLGYLVPGDEIIVDFSHITLSENIGKFVEFLNKIGADCTAYRHWVVVGTDTEKVLILKPSMISSEGIDKLYSNCERNNFDYSSYEKSINEILAGKGWRVSVNVLAQYKAATIRRNALGEVRWASRSHLPISWSWDTGENRE

SEQ ID NO: 459 - protein, 1186 aa, Gardnerella vaginalis
MEGNISYAIGIDVGLNSVGLAAIRLDNNGEPIRILKAMSVIHDAGIDPNGAKESDTRKAISGVARRVRRLYRQRRRRLQKLDFLLHSLGFPVVENKDLDFSDSFIPWIFRAKLADEYIADEKQRKQMLSVAIRHIARHRGWRNPYQSIKSMTQETEYSEFYNELLKNIEKFAPGVGCEGSTPAQLVRDYLLLQQGKASRRLRITTDEKRKNHPNSLNPILPRKLMQSDNMLEILNIFNVQHIDDKYVREQIINAVFYAKSPRGSAENRVGKDAITGKGKRALKASLAFQKYRIISTISNLRIRENSKERCLTIEEKQSVYKLLTTSTDESSKEKSAEAPLYTWIDVADCLGIERYKLRGVGSQIGDGESVGNRPPMLNSELAIIYANNKSLGKSLLTWWLDANRTQEDKEALIEILSNTVDIEAIHDNPEYQDKYGSAIAFIDSMDETEIAALENISLPDGRAAYSLETLDKLNKQMLETDDDLFEARKKLFNLPNNWRPSEAPIAEPTGNPSVDRVLKIVHRFLISAKNRWGNPERINIEHVRSGFKSKKMANSYKELLDKRTKGKENLKAMMRNSLHLGMSDSISDADIRRYEAVQRQNGQCLYCGSEITYHTCELDHIVPRKGPGSTNTRENLVATCSLCNAQKCNTPFSTWCEQSTYCKNHDISVDSAINRVRAFIFPPNSYDKRGANQFKKEVIARLKQKVGDEAFDNRSIESVAWMANELHRRIDWYYNSQNYQTNNGISDITNKAQTNVGVYAGSLTAIARRMSGIDGKLEFFDGRRKTRFDRRHHAVDASVIAMMTPGIAQILAIKCNLRETQLLQGNKVVPGGIDWKEYPTANDQGYQQYANWSVRMNALLKLLNEEMRADRIAVVNSIRLRYNNSSVHQYKVNALLKLHVGDEIDSGTIRRSSTPALYCALTRNPDYDVNNGLPENPNRAILLHDKKLNADDSITFFKAQAVQLFVREGSAEIGSSTHHLRIYEYFKKLKSGKIKKSYGMIRVFQNDLHRHIHEDLFSCDLPEQSISMRYADTEVAHAVQTGNSNYLGYLVPGDEIIVDFSHVKLSGNIGTFVEFLNKIGANCAAYNHWVVVGTDTEKVLILKPSMISSEGIDKLYSNCKRNNFDYSSYEKSINEILVGKGWRVSVNVLAKYNAETIRRNALGEVRWTSRSHLPISWSWNTGENRE

SEQ ID NO: 460 - protein, 1258 aa, Gemella haemolysans
MTEENPDIRKVFLAIHHILKNRGHFLLQGQSFKEGNLNNLIKELLNLDILHISIEITEENINKITEIALEKKTLTDKVNDLKKIYPKEKQLLEAFRLIFGGKTSLDKLFAIDEYKELDASVKSVSFKEKIYEEVRHDYEQVLSNYIELLDLAKLVYDSIILSDIKKEGKTLSESKVELYHKHREDLTKLKTLVKNDSKLSEDKKVELYSAIFKEDKDKGTNYVNYIRKSEEGKGCNYEDFKKFLVKELAKLEESSAKEEILRDLELELFLPLQRTKDNSVVPYQIHKEELVKILDNAAKYHKFLNEKDDSGYSIIEKVIQLLEFRIPYYVGPLNSSKKAKVDGFAWSVRNKGYENTPVTPWNYEKVIDESASAEKFITNLTNKCTYLKGEDVLPKSSLLYSEFALLNELNALKYDGNRISLEARNVIIEKLFKEQGKKVTKTSIKNLLKAEGYIDGKGEITGIDITVKNDLKSYRDFKKILGDKFNTEHVENIILWITLYGESRKLIKAKIEAVYGDIYSKEEIAKMSRLVYKDWGRFSRKLLTELVSKKLYNEETGECLNIIGAMRQNNILFMELLADRFDYSQQIIDYNKELQKEVTEITPEILDDLYVSPSVKRSIWQTVRIVEELKKIIGCAPAKIFVETTRSNQDKKKPTDSRKKQLELFYKAVKKDVKDLEKEIGSLNFDKLNERLSSVEPSKLKAKKLYLYYTQLGRCMYSGETIDITQLNTTAYDIDHIYPQSKVKDDSFTNTVLVKREYNAAKTDRYPLGSDIQTPSNRRFWKFLKEKGLITDEKYNRLVRTEEFSDEELTGFIARQLVETSQSVKAVAGILGELNPKTSICYSKAENVSSFRQNFGKIKEGNRKSDNTEQLIKVREINDYHHAKDAYLNVVVGNVYDTKFTRNVFNFIKDKKDGRKYSLNNVFYENVSNSNNVAWELNKTVHQVEKVMNNNNILVTRRTSEQKGGLFDATVYKAKVAAKAKEGVYYPLKTSDPVVNDVTKYGGFTKVKIAYYSIFEYTLVNKKGEEKITRIIPIPIYVSQNIKDDSTLLEFGKTQINIKSGEEVKDFKLKYRKLCIGDLVKINNFFNFIGGKTNDSFVYDGAVQVTLDTESERYIKTLSKYQNWKKENKDGELWESITKEKNTELYNLLVEKMNSGIFIKKKPNKFNELNSEEIRNNFSSISLEEQAKVLLEVLNLLTNKKSIFDLKSINITAARGKISFNLSNLSQFSIIEQSVAGFYEKEITIIGDKENDMENNNC

SEQ ID NO: 461 - protein, 1054 aa, Haemophilus parainfluenzae
MENKNLNYILGLDLGIASVGWAVVEIDEKENPLRLIDVGVRTFERAEVPKTGESLALSRRLARSARRLTQRRVARLKKAKRLLKSENILLSTDERLPHQVWQLRVEGLDHKLERQEWAAVLLHLIKHRGYLSQRKNESKSENKELGALLSGVDNNHKLLQQATYRSPAELAVKKFEVEEGHIRNQQGAYTHTFSRLDLLAEMELLFSRQQHFGNPFASEKLLENLTALLMWQKPALSGEAILKMLGKCTFEDEYKAAKNTYSAERFVWITKLNNLRIQENGLERALNDNERLALMEQPYDKNRLFYSQVRSILKLSDEAIFKGLRYSGEDKKAIETKAVLMEMKAYHQIRKVLEGNNLKAEWAELKANPTLLDEIGTAFSLYKTDEDISAYLAGKLSQPVLNALLENLSFDKFIQLSLKALYKLLPLMQQGLRYDEACREIYGDHYGKKTEENHHFLPQIPADEIRNPVVLRTLTQARKVINGVVRLYGSPARIHIETGREVGKSYKDRRELEKRQEENRKQRENAIKEFKEYFPHFAGEPKAKDILKMRLYKQQNAKCLYSGKPIELHRLLEKGYVEVDHALPFSRTWDDSFNNKVLVLANENQNKGNLTPFEWLDGKHNSERWRAFKALVETSAFPYAKKQRILSQKLDEKGFIERNLNDTRYVARFLCNFIADNMHLTGEGKRKVFASNGQITALLRSRWGLAKSREDNDRHHALDAVVVACSTVAMQQKITRFVRFEAGDVFTGERIDRETGEIIPLHFPTPWQFFKQEVEIRIFSDNPKLELENRLPDRPQANHEFVQPLFVSRMPTRKMTGQGHMETVKSAKRLNEGISVIKMPLTKLKLKDLELMVNREREKDLYDTLKARLEAFNDDPAKAFAEPFIKKGGAIVKSVRVEQIQKSGVLVREGNGVADNASMVRVDVFTKGGKYFLVPIYTWQVAKGILPNKAATQYKDEEDWEVMDNSATFKFSLHPNDLVKLVTKKKTILGYFNGLNRATGNIDIKEHDLDKSKGKQGIFEGVGIKLALSFEKYQVDELGKNIRLCKPSKRQPVR

SEQ ID NO: 462 - protein, 1052 aa, Haemophilus parainfluenzae]
MKNTSLNYVLGLDLGISSVGWAVVEIDEKENPLSLIDVGVRTFERAETQKGESLALARRLARSARRLTQRRVARLKKAKRLLKSENILLSTDECLPHQVWQLRVEGLERKLERQEWAAVLLHLIKHRGYLSQRKNESKSENKELGALLSGVANNHKLLQQTTYRTPAELAVKKFEVEEGHIRNQQGSYTHTFSRLDLLSEMELLFSRQQHFGNPFTSEKLLENLTALLMWQKPALSGDAILKMLGKCTFENEYKAAKHTYSAERFIWITKLNNLRIQENGLERALNDNERLALMKQPYEKAKLTYAQVRSILNLSDEAIFKGLRYSGEDKKTSETKTVLMEMKAYHQIRLALEKNDLKTEWAELKVNSSLLDEIGTAFSLYKTDEDISTCLAGKLSQPVLNALLENLNFDKFIQLSLKALHKILPLMQQGLRYDEACAEIYGDHYGKKTEENHLLLPQIPADEIRNPVVLRTLTQARKVINGVVRLYSSPARIHIETGREVGKSYQDRRELEKRQEENRKQREKAISEIKTLFPNFSGEPKAKDILKMRLYYQQNAKCLYSGKPLELHRLLEQGYVEIDHALPFSRTWDDSFNNKVLVLANENQNKGNLTPFEWLDGKNNSERWKAFKALVETSAFPYTKKQRILSQKLDEKGFIERNLNDTRYVARFLCNFIADNMHLTGEGKRKVFASNGQITALLRGRWGLAKSREDNDRHHALDAVVVACSTVSMQQKITRFVRFEEGNVFTGERIDRETGEIIPLHFPAPWKFFREEVEIRIFSDNPKLELENRLIARPQANHEFVQPLFVSRMPTRKMIGQGHMETIKSAKRLNEGLSVIKMLLTKLRLKDLESMVNREREKELYEALKARLEAFNDEPAKAFAEPFMKKGGAIVKSVRVEQVQKSGVLVRDGNGVADNASMVRVDVFTKGGKYFLVPIYTWQVAKGILPNKAVIQGKNEEDWEVMDDATFRFSLHQNDLVKLVTKKKTIFGYFNGLNRATGNIDIKEHDLEKSKVKDGIHQSIGIKLALSFEKYQVDELGKNIRLCKSSKRQAVR

SEQ ID NO: 463 - protein, 121 aa, Haemophilus pittmaniae
MLNRRYAAKITRFVRFEAGDVFTGERIDRETGEIIPLHFPTPWQFFKQEVEIRIFSDNPKLELENRLPDRPQANHEFVQPLFVSRMPTRKMTGQGHMETVKSAKRLNEGISVIKMPLTKLN

SEQ ID NO: 464 - protein, 203 aa, Haemophilus pittmaniae
MVNREREKDLYDALKARLEAFNDDPAKAFAEPFIKKGGAIVKSVRVEQVQKSGVLVREGNGVADNASMVRVDVFTKDGKYFLVPIYTWQVAKGILPNKAATQYKDEEDWEVMDNSAIFKFSLHPNDLVKLVTKKKTILGYFNGLDRATGNIAIKEHDLEKSKAKGGIHQGVGIKLALSFEKYQIDELGKNIRLCNPSKCQSVR

SEQ ID NO: 465 - protein, 1052 aa, Haemophilus sputorum
MKNTSLNYVLGLDLGISSVGWAVVEIDEKENPLSLIDVGVRTFERAETQKGESLALARRLARSARRLTQRRVARLKKAKRLLKSENILLSTDECLPHQVWQLRVEGLERKLERQEWAAVLLHLIKHRGYLSQRKNESKSENKELGALLSGVANNHKLLQQTTYRTPAELAVKKFEVEEGHIRNQQGSYTHTFSRLDLLSEMELLFSRQQHFGNPFTSEKLLENLTALLMWQKPALSGDAILKMLGKCTFENEYKAAKHTYSAERFIWITKLNNLRIQENGLERALNDNERLALMKQPYEKAKLTYAQVRSILNLSDEAIFKGLRYSGEDKKTSETKTVLMEMKAYHQIRLALEKNDLKTEWAELKVNSSLLDEIGTAFSLYKTDEDISTCLAGKLSQPVLNALLENLNFDKFIQLSLKALHKILPLMQQGLRYDEACAEIYGDHYGKKTEENHLLLPQIPADEIRNPVVLRTLTQARKVINGVVRLYSSPARIHIETGREVGKSYQDRRELEKRQEENRKQREKAISEIKTLFPNFSGEPKAKDILKMRLYYQQNAKCLYSGKPLELHRLLEQGYVEIDHALPFSRTWDDSFNNKVLVLANENQNKGNLTPFEWLDGKNNSERWKAFKALVETSAFPYTKKQRILSQKLDEKGFIERNLNDTRYVARFLCNFIADNMHLTGEGKRKVFASNGQITALLRGRWGLAKSREDNDRHHALDAVVVACSTVSMQQKITRFVRFEEGNVFTGERIDRETGEIIPLHFPAPWKFFREEVEIRIFSDNPKLELENRLIARPQANHEFVQPLFVSRMPTRKMTGQGHMETIKSAKRLNEGLSVIKMLLTKLRLKDLESMVNREREKELYEALKARLEAFNDEPAKAFAEPFMKKGGAIVKSVRVEQVQKSGVLVRDGNGVADNASMVRVDVFTKGGKYFLVPIYTWQVAKGILPNKAVIQGKNEEDWEVMDDATFRFSLHQNDLVKLVTKKKTIFGYFNGLNRATGNIDIKEHDLEKSKVKDGIHQSIGIKLALSFEKYQVDELGKNIRLCKSSKRQAVR

SEQ ID NO: 466 - protein, 1338 aa, Helcococcus kunzii
MQDYYLGLDIGTNSVGWAVTDENYNLLRKKGKDLWGVRLFKEAQPATERRGHRSSRRRTIRKSLRKQLLRELFEEEINAIDKDFFLRLDESKYWLEDKKIEGKYSLFNDENFTDKDYYEKFPTIFHLRKALIESDDKEDIRLYFLAINQMMKRRGHFLIDGKLSNVEDITPFKECIQNLINEELDTEIETEFYDKAIKIVSDYSLKKTEKKNLIKDLVKETDSIEDSKKIINIFNLLISGKSKVNGIFDDEEILEKIKEDNKEDFYLTSEKYEENLEYFSQLLDYRFELISSLKSIYDYIILQEVLKGKKYLSYAQVERYKNHKEDLRKLKQLIKKYDKNGKIYYQIFRDENFKKGYVAYLGYYKKNKKNVPVKKCDYDTFSKNIKSTLDKICDKEDPLYIELIDKIEKGGFLLKQIVSTNSVIPHQVHELELDKILENLEKNYPSFKEISDGVSKIDKIKMIFNFRIPYYVGPLNDYHKDKVNSNTWIVKNEGFENENIRPWNFSKIVDEHACEEEFIKRMINECSYIPGEKVLPKSSLLYSEYMVLNELNNLRVNGDKLNPKIKKEIVENIYKKERKVTLKKIRNFLIINNYVDSKVEFSGLSDGIKANMSSYIDFAEILDDNFDNNMVEDLIEQITIHVGNVKLLTEKISNKYPNLEKKQINKIVNLKFKDWARFSRKLLVGIEGTEKETGEINTIIGFLRETNENFMELMSNRYTFSEEISEIKKKYIPNKLSKQIVDDLYVSPAVKKMIWQVLNINDELIKVLGKQPKKIFIEMARGKEEKPEVKDSRKNKLIELYKNLGKEGKEWLNRIEDKTEADFRNRALYLYYTQMGRCMYTGEIIDIERLYDKELYDLDHIIPRKMKKDDSIHKNLVLVTRNSNQYEKKDNYPVPEVIKSRENVRHLWYALKKKGLITEEKYNRLTRINPLSDKELSEFIERQLVETRQTTKVVKDLFENYYTDSKIVTVKAGLVSELRRDFEVLKCREINDLNHAHDAFLNIIVGDVWSKKFTSNPYNFVKKNREKYTLNNIFTKNQKDLRGNEIWNCAEGKKRIIKTLNKPSVLFSVENFEQTGQLFDQNIIGKQDYKEKTSYVPIKGDERLQDISKYGGYRGISGAYFFIVEHTEKNKRVKTIESLPIYMKSYVEENGLLDFCTNEMKLVDPKIIVKKLNYKSEIIVDGFKYLISGKTENRLSLETNEYLYWNHTQTTDIKKILNINEKIELEKYNGDIESERENIIKYIQIILEKFKLKPFIKRRNLPNIEINFADYETEKLLQLLVNLIPLTTKYVSPVDLTVISGSKYAGKVLIPKKISNLNEVIFISKSITGIYESRRRII

SEQ ID NO: 467 - protein, 1023 aa, Helicobacter cinaedi
MKIYSFDIGVASIGWAFIENEVLQDCGIRIFTKAENPKNGASLALPRREARGVRKRLARRRGRLNTIKQLLCKEFGLQLEDYLSNDGELPKAYTASKANPLKSPYELRTLALSQKLDSKDLVRVILHIAKHRGYGNKHAKDSKDTESGKVKKAIEFNRKTLAEKGYRSVGEYLYREFFQQSRISQNNGATEFINVRNKAGNYEHCVAQDMLKEELESILNAQRQFGFSLKQDFENKLLTKIFEQRPLKSFADKVGNCCFIAGEKRTPKDSLSAIEFIALSRTINTLINLSKESGEIYNRAIILQIVESTLKKGEISYKELREIIRLDERLRFKDPRLDYSREIKEAEKVKFLEFKQLKGFKKALGESFTTLARSQLDEIAEHIALIKDRVKLNEKLESYALTKEQREALSNLSFSAHINLSLQALKQILPFMRGDNGEQCLDYDESVEKAGLKALSKDTLKGQMLPPLNEFEPYLSNPVVARALAEYRKVLNALLKQYGSPHKIHIEYAREAKLSSTERQKYEKEQKDNYAANQAAHKKCQELGLEPSSTNLLKLKLWQEQGGLCLYSGAKITISYLQDPTALQVDHIYPYSRSFDDSYMNKCLVLTKANQEKGNRTPFEAFGTDSAKWGVITTLAQKLPHKKRRRILNTAFNDKEAGFKLRNLNDTSYIARLVADYTETYLEFLPLVESENTTLGKGQKGSKKHIAIVNGALTSTMRYYLGFASKDRDNHLHHALDAVIIGFMNDSVIKAFSDFKKTQETSKAAYYAHTLSKQEYKKQRAFIQLPSGENFRASVLEKVESVFVSKPPRKRVRGALHEATFYSPNDPKLLKNYGGTKGVERALALGKMRKVGAKIVSNGAMVRVDIFRHKSSGKFYGVPVYTMDFALGILPNKAVVVGKDKNGVIKDWLEMDSSYEFIFSLYKDDLLLVQKKEMAEPELCYFMSFNSSIAQISVAKHDNNFSTLTKNQKLLFSNATQEDVSGKSIGIQNLQVFEKWQVSVLGEVKRTQSYPRENISLASKAKK

SEQ ID NO: 468 - protein, 1023 aa, Helicobacter cinaedi
MKIYSFDIGVASIGWAFIENEVLQDCGIRIFTKAENPKNGASLALPRREARGVRKRLARRRGRLNTIKQLLCKEFGLQLEDYLSNDGELPKAYTASKANPLKSPYELRTLALSQKLDSKDLVRVILHIAKHRGYGNKHAKDSKDTESGKVKKAIEFNRKTLAEKGYRSVGEYLYREFFQQSRISQNNGATEFINVRNKAGNYEHCVAQDMLKEELESILNAQRQFGFSLKQDFESKLLTKIFEQRPLKSFADKVGNCCFIAGEKRAPKDSPSAIEFIALSRTINTLINLSKESGEIYNRAIILQIVESTLKKGEISYKELREIIRLDERLRFKDPRLDYSREIKEAEKVKFLEFKQLKGFKKALGESFTTLAISQLDEIAEHIALIKDRVKLNEKLESYALTKEQREALSNLSFSAHINLSLQALKQILPFMRGDNGEQCLDYDESVEKAGLKALSKDTLKGQMLPPLNEFEPYLSNPVVARALAEYRKVLNVLLKQYGSPHKIHIEYAREAKLSSTERQKYEKEQKDNYAANQAAHKKCQELGLEPSSTNLLKLKLWQEQGGLCLYSGAKITISYLQDPTALQVDHIYPYSRSFDDSYMNKCLVLTKANQEKGNRTPFEAFGTDSAKWGVITTLAQKLPHKKRRRILNTAFNDKEAGFKLRNLNDTSYIARLVADYTETYLEFLPLVESENTTLSKGQKGSKKHIAIVNGVLTSTMRYYLGFASKDRDNHLHHALDAVIIGFMNDSVIKAFSDFKKTQETSKAAYYAHTLSKQEYKKQRAFIQLPSGENFRVSVLEKVESVFVSKPPRKRVRGALHEATFYSPNDPKLLKNYGGTKGVERALALGKMRKVGAKIVSNGAMVRVDIFRHKSSGKFYGVPVYTMDFALGILPNKAVVVGKDQNGVIKDWLEMDSSYEFIFSLYKDDVILVQKKEMQRPELCYFVSFDTSGASIKVAKHDNNFSTLTENQKLLFSNATKEEVVGKSIGIQNLKVFEKWQVSVLGEVKRTQSYPRENISLASKAKK

SEQ ID NO: 469 - protein, 344 aa, Helicobacter pullorum
MKILGFDIGIASIGWAFVENGELKDCGVRIFTKAENPKTGDSLAMPRREARSVRRRLARRKGRLETLKRLLAKEWDLCYEDYIAADGELPKAFMGKNLTNPYVLRYEALQRLLSKEELVRVVLHIAKHRGYGNKNAKITKSEESKREQGKILSALATNASVIARYRTVGEYFYKEFCEVIKNPQGLNTNENCTQPKVRVLKPIRNKGGEYTNCILQEDLQRELRCIFEHQKGFGFSITQEFQDKILKIAFYQRSLKDFSHLVGKCTFYPDEPRAPKFSLSAIEFITKAKAINLLASIAKESGEVWDKEQWRERLDSVFSAVCERGINTIPSSSHFLNIFDILYL

SEQ ID NO: 470 - protein, 1688 aa, Ignavibacterium album
MEFKKVLGLDIGTNSIGCALLSLPKSIQDYGKGGRLEWLTSRVIPLDADYMKAFIDGKNGLPQVITPAGKRRQKRGSRRLKHRYKLRRSRLIRVFKTLNWLPEDFPLDNPKRIKETISTEGKFSFRISDYVPISDESYREFYREFGYPENEIEQVIEEINFRRKTKGKNKNPMIKLLPEDWVVYYLRKKALIKPTTKEELIRIIYLFNQRRGFKSSRKDLTETAILDYDEFAKRLAEKEKYSAENYETKFVSITKVKEVVELKTDGRKGKKRFKVILEDSRIEPYEIERKEKPDWEGKEYTFLVTQKLEKGKFKQNKPDLPKEEDWALCTTALDNRMGSKHPGEFFFDELLKAFKEKRGYKIRQYPVNRWRYKKELEFIWTKQCQLNPELNNLNINKEILRKLATVLYPSQSKFFGPKIKEFENSDVLHIISEDIIYYQRDLKSQKSLISECRYEKRKGIDGEIYGLKCIPKSSPLYQEFRIWQDIHNIKVIRKESEVNGKKKINIDETQLYINENIKEKLFELFNSKDSLSEKDILELISLNIINSGIKISKKEEETTHRINLFANRKELKGNETKSRYRKVFKKLGFDGEYILNHPSKLNRLWHSDYSNDYADKEKTEKSILSSLGWKNRNGKWEKSKNYDVFNLPLEVAKAIANLPPLKKEYGSYSALAIRKMLVVMRDGKYWQHPDQIAKDQENTSLMLFDKNLIQLTNNQRKVLNKYLLTLAEVQKRSTLIKQKLNEIEHNPYKLELVSDQDLEKQVLKSFLEKKNESDYLKGLKTYQAGYLIYGKHSEKDVPIVNSPDELGEYIRKKLPNNSLRNPIVEQVIRETIFIVRDVWKSFGIIDEIHIELGRELKNNSEERKKTSESQEKNFQEKERARKLLKELLNSSNFEHYDENGNKIFSSFTVNPNPDSPLDIEKFRIWKNQSGLTDEELNKKLKDEKIPTEIEVKKYILWLTQKCRSPYTGKIIPLSKLFDSNVYEIEHIIPRSKMKNDSTNNLVICELGVNKAKGDRLAANFISESNGKCKFGEVEYTLLKYGDYLQYCKDTFKYQKAKYKNLLATEPPEDFIERQINDTRYIGRKLAELLTPVVKDSKNIIFTIGSITSELKITWGLNGVWKDILRPRFKRLESIINKKLIFQDEDDPNKYHFDLSINPQLDKEGLKRLDHRHHALDATIIAATTREHVRYLNSLNAADNDEEKREYFLSLCNHKIRDFKLPWENFTSEVKSKLLSCVVSYKESKPILSDPFNKYLKWEYKNGKWQKVFAIQIKNDRWKAVRRSMFKEPIGTVWIKKIKEVSLKEAIKIQAIWEEVKNDPVRKKKEKYIYDDYAQKVIAKIVQELGLSSSMRKQDDEKLNKFINEAKVSAGVNKNLNTTNKTIYNLEGRFYEKIKVAEYVLYKAKRMPLNKKEYIEKLSLQKMFNDLPNFILEKSILDNYPEILKELESDNKYIIEPHKKNNPVNRLLLEHILEYHNNPKEAFSTEGLEKLNKKAINKIGKPIKYITRLDGDINEEEIFRGAVFETDKGSNVYFVMYENNQTKDREFLKPNPSISVLKAIEHKNKIDFFAPNRLGFSRIILSPGDLVYVPTNDQYVLIKDNSSNETIINWDDNEFISNRIYQVKKFTGNSCYFLKNDIASLILSYSASNGVGEFGSQNISEYSVDDPPIRIKDVCIKIRVDRLGNVRPL

SEQ ID NO: 471 - protein, 1354 aa, Indibacter alkaliphilus
MKKILGLDLGTTSIGWAFIKEPEKDVVGSEIVDMGVRIVPLSSDEENDFAKGNTISINADRTLKRGARRNLQRFKQRRNALLETFKEKNLIPSNFQYAEDGPSSTFSTLKLRDKAAKEKIELDDFVKVLLQINKKRGYKSSRKAMSEEDEGTAIDSMGIAKELYENDLTPGQWVYEALKNGRKNVPDFYRSDLQEEFKKIVNYQSEFYPDILNTSFVEDWMGKASTPTKQYFNKRGVQLAENKGKREERRLQEYKWRAEAVNFKIDLSEIALILSQINSQISNSSGYLGAISDRSKELYFKNLTVGQYLYQQVKKNPHTRLKGQVFYRQDYLDEFEKIWSVQSSFYPQLNDELKQEVRDVTIFFQRRLKSQKHLISNCEFEEHHKVVPKSHPIFQEFRIWQNLNNLTLIKKDNLNEKCELALEDKTALANELAFKKELSVKDALKVLGLKPSDWEFNFTKIEGNRTNHAFFEAFAKIIELEDGEPIDLGNLKADDILDQFSEAFLRIGIDTELLQVNSDIEGAEYEKQSYIQFWHLLYSSEDDQKLKQNLIRKFGFKPEHAKILASISLQDDHASLSSRAIKKILPHLQSGLIYDKACTYAGYNHSSSFTKDENEKRELRAELELLKKNSLRNPVVEKILNQMINVVNAILKDPNLGRPDEIRVEMARELKANAEQRKNMTSNIASATRDHEKYREILKKEFGLKRVTKNDLLRYKLWLETDGISLYTGKPIEASKLFSKEYDIEHIIPKARLFDDSFSNKTICERQLNIDKANVTAFSFLQNKLSADEFEQYQSRVKSLYGKLSKAKIQKLLMANDKIPEDFIARQLQETRYISKKAKEILFEITMRVSVTTGTITDKLREDWGLVEIMKELNWEKYDKLGLTYTIEGKHGERLNKIKDWNKRNDHRHHAMDALTVALTKPAYIQYLNNLNAKAIGNKKGTEIFAIEQKYLKRENGKLCFIPPIENIRAEAKKHLSKILVSYKAKNKVVTINKNKTKKKAGFNEQTALTPRGQLHKETVYGKSFHYSTKFEKIGASFDAQKINTVAKKEEREALLKRLAENGNDPKKAFTGKNSLNKMPIYLDLGKNIKLSEKVKTVVLEQNYTIRKNIDPDLKVDKVIDVGIKRILESRLEEFGGNAKLAFSNLEENPIWLNKEKGIPIKRVKISGVSNVESLHVKKDHFGEKILDEEGNEIPVDFVSTGNNHHVAIYEDEDGNLQDEVVNFYEAVIRRNQGESIIKYRHEEGWNFLYSIKQNEFFVFPSQDFNPNDFDLLDPKNYDLISPNLYRAQKFSKVMYGNSAVRDYVFRHHLETVLNDVKELKDVAYKQLKSLQYLNGIKKVRLNHLGQIIQVGEY

SEQ ID NO: 472 - protein, 1397 aa, Joostella marina
MKKVLGLDLGTNSIGWALVNEATKEEKKEGKSSEIIKLGVRVNPLTVDEKTNFEKGRPLSTNADRTLKRSARRNLQRYKLRRRNLIEILIKNGFITKDTPLTETGKDTTHQTLKLRAKSAKEKVDLKDFAKILLTINKKRGYKSSRKVNSDEDGLAIDGMAVAKHLYEQNLTPGQYVLNLLQKNKKYVPDFYRSDLQEEFKNIWNNQKTYYFDILTDTLFEELKDKNKSQTWAICKKPFDIAGIKQIGKASDKRLERYKWRTEGLTQKLNLEYLAIALQEINNDINKSSGYLGAISDRSKELFFNKETVGENLYRQLVKTPHTSLRNQVFYRQDYLDEFETIWETQAKFYPQLTHTLKEEIRDVIIFYQRKLKSQKSLISFCQFESWEQTYIEKETGKSKTRTVGRKVIPKSSPLFQEFKIWQNLNSLEFRNSDEGEIIEFIKLDEDIRQTVFEELNLRGNLKPNDVLKILGNYISLGKVSQWKCNFEEIEGNRTNAALYNVYQIIAENEGYGFDWAKKTASEINKELKNIFPQLGIDASILDFDFTQANFDKQTSYQLWHLLYSAEEDFKISEEDKVLYGNSSVSLKKKLHQKYGFKPEYTKLLTNISLQPDYGNLSAKAICNILPYLKENNVYSEACDLTGYNHSNFLTAEEQAKRPLKPILELLKKNSLRNPVVEKILNQMVNVVNQVIETYGKPDEIRIELTRELKKSAKERANMTKSIADATRRNDDYRKTIIKEFGIPNPTKSDVVRYRLWQELASRGYKDIFTDTEIKPQELFSNKIDIEHIIPKALLFDDSFSNKTLAFKKDNLKKANRTAYDFIANDYAPNLENYIERVESLHKDRKITRAKRNKLLMLQSKLPDGFIERDLRNSQYITKEAKKMLYEVCRTVVSTSGSITDKLREDWDLINVMKELNFPKYKALGLTEKIERYDIGAEKMKEVEIIEDWNKRNDHRHHAIDALTVAFSTHSHIQYLNHLNARRDEGHKKHAAIIAIESTITEKEGNKKRRFIAPLPNFRLQAKEHIESILVSFKNKNKVVTNNINKTKRIKKDKFNTKVQLTPRGQLHKETIYGKIKQPLEKHIKLNKSFTLEQAKLIIDKRQREKVLNHLEKYAHNSDIAFNSKTLKKNPLLISDEPLKEVLCFEEVFTIRKDISYDNFKNEKQLDKVIDEKVKQALKERINQYNGDFREAFSDIERNPIWLNKAKGICVKRATIKGVSNAEPLHTAKNHLGEEVLTENKEQIPVDYVSTGNNHHVAIYEDEDGNLQEKVVSFYEAVIRVNEGLPIIDKEYNKSLGWTFKFTMKQNEMFVFPSEDFNPTEIDLLDQKNASLISPNLFRVQKFTIKDYFFRHHLETTVENNNTLKNTTWRREGLSGIYGIIKIRLNHLGEIVQVGEY

SEQ ID NO: 473 - protein, 1060 aa, Kingella kingae
MAAKSLNYILGLDLGIASCGWAVVEMDEQENPLRLIDVGVRTFEEAENPKDGSSLAETRRLARAQRRLISRRANRMNKLCRLLKQENVLQANDYDEKGLIIGLPNQAWELRAQGLDRKLEPKEWAAVLIHLVKHRGYLSQRKNESQTADKELGALLSGMNHNHQLLQSQSNQYRTPAELAIKQFATQDGHIRNQRGAYTHTFNRLDLQNELNQLFDAQTRLGNPHVSGSLKTAINDLLMNQKAALSGDAILEMLGRCTFEPSEYKAAKNTYSAERFVWLGKLTNLRIQDNGLESALSREQRELLLNEPYNKTKLTYQQVRKLLRLPETAFFKGLRYGKDNAESATFMEMKSYHAIRKSLENKSLKSEWEKLKTQPKLLDLIGTAFSIYKTDDEIAGCLKNQLPENVIIALQGQLNFSNFMELSLKALEKLLPLMEQGLRYDEACTQIYGNRHEKIADKTEKFLPNIPADKLRNPVVLRTLTQARKVINAIIRRYGSPARVHIETGREVGKSFSDRDKLKKQQEENQEQRRRAIDEWKQFFPNAAHEPKAVDILKLRLYQLQQGKCLYSGLPIDVRRLPEKGYVEIDHALPFSRTWDDSFNNKILVLASENQNKGNQTPYEYLRGADNSESWRLFVENVQNCQFSPNKKQKIMAKQLDEKGFLERNLNDTRYVSRFLCQFISEHLHLTGKGKKRVFASNGQITALLRGRWGLSKNREENDRHHAVDAVVVACSTVAMQQKITQFVRYQKGNVFTGERIDKETGEVISIHFPTPWEHFREEVMIRVFDDNPLRTLPEKLPNRPEALHEYVMPLFVSRMPTRKMTGQGHKETIKSAKRLDEKISVLRVPLTQLKLNDLENMVNREREPALYEALKARLEQFKNDPAKAFAEPFFKQGGQQVKAVRVEIVQKSGMLLRKINGVADNGSMVRVDVFEKSGKFYLVPIYAWQVAEGILPNYAVVAHKDESDWILMDESYHFKFALYKNDLLEVQTKKGGIMGYFASLDRATGAITIREHDRDKKKCKDGEHRSIGVKMASSFKKLQVDELGKNIHETRSRKRPNIG

SEQ ID NO: 474 - protein, 1314 aa, Lactobacillus animalis
MLKKDYSIGLDIGTNSVGHAVVTDDYKVPTKKMKVFGDTSKKTIKKNMLGVLLFNEGQTAADTRLKRGTRRRYTRRKNRLRYLQEIFAPELAKVDPNFLYRLEESSLVAEDKKYDVYPIFGKREEELLYHDTYKTIYHLRSALANNDQPADLRLVYLALAHIIKYRGNFLLEGEIDLRTTDINKVFAEFSETLNENSDENLGKLDVADIFKNNTFSKTKKSEELLKLSGAKKNQLAHQLFKMMVGNMGSFKKVLGTDEEHKLSFGKDTYEDDLNDLLAEAGDQYLDIFVAAKKVYDAAILASILDVKDTQTKTVFSQAMIERYEEHQKDLIELKRVFKKYLPEKCHDFFSEPKISGYAGYIDGKVSEEDFYKYTKKTLKGIPETEEILQKIDANNYLRKQRTFDNGAIPHQVHLKELVAIVENQGKYYPFLRENKDKFEKILNFRIPYYVGPLARGNSKFAWLTRAGEGKITPYNFDEMIDKETSAEDFIKHMTINDLYLPTEPVLPKHSLLYERYTIFNELAGVRYVTENGEAKYFDAQTKRSIFELFKLDRKVSEKMVIKHLKVVMPAIRIQALKGLDNGKFNASYGTYKDLVDMGVAPELLNDEVNSEKWEDIIKTLTIFEGRKLIKRRLENYRDFLGEDILRKLSRKKYTGWGRLSAKLLDGIYDKKTHKTILDCLMTEDYSQNFMQLINDDNYSFKETIKNAQVIEKEETLAKTVQELPGSPAIKKGILQSLEIVDEIIKVMGYKPKSIVVEMARETQKTHGTRKREDRVQQIVENLKDANELPEKLPSNAELSDERKYLYCLQNGRDMYTGAPLDYDHLQFYDVDHIIPQSFLKDDSIENKVLTIKKENVRKTNGLPSEAVIQKMGSFWKKLLDAGAMTNKKYDNLRRNLHGGLNEKLKERFIERQLVETRQITKYVAQLLDQRLNYDGNGVELDEKIAIVTLKAQLASQFRSEFKLRKVRALNNLHHAHDAYLNAIVANLIMAKYPELEPEFVYGKYRKAKFKGLGKATAKNTLYANVLYFLKENEVYPFWDKARDLPTIKRYLYRAQVNKVRKAERQIGGFSDEMLVPKSDSGKLLPRKEGLDPVKYGGYAKAVESYAVLITADEVKKGKTKKVKTLVNIPIIDSKKYEADPTAYLASRGYTNVTNSFILPKYSLLEDPEGRRRYLASFKEFQKANELILPQHLVELLYWVNAKDGEQKLEDHKAEFKELFDKIMEFADKYVVAPKNSEKIRRLYEENQDATPMELGKNFVELLRYTADGAASDFKFFGENIPRKRYNSAGSLLNGTLIYQSKTGLYETRIDLGKL

SEQ ID NO: 475 - protein, 1371 aa, Lactobacillus buchneri
MKVNNYHIGLDIGTSSIGWVAIGKDGKPLRVKGKTAIGARLFQEGNPAADRRMFRTTRRRLSRRKWRLKLLEEIFDPYITPVDSTFFARLKQSNLSPKDSRKEFKGSMLFPDLTDMQYHKNYPTIYHLRHALMTQDKKFDIRMVYLAIHHIVKYRGNFLNSTPVDSFKASKVDFVDQFKKLNELYAAINPEESFKINLANSEDIGHQFLDPSIRKFDKKKQIPKIVPVMMNDKVTDRLNGKIASEIIHAILGYKAKLDVVLQCTPVDSKPWALKFDDEDIDAKLEKILPEMDENQQSIVAILQNLYSQVTLNQIVPNGMSLSESMIEKYNDHHDHLKLYKKLIDQLADPKKKAVLKKAYSQYVGDDGKVIEQAEFWSSVKKNLDDSELSKQIMDLIDAEKFMPKQRTSQNGVIPHQLHQRELDEIIEHQSKYYPWLVEINPNKHDLHLAKYKIEQLVAFRVPYYVGPMITPKDQAESAETVFSWMERKGTETGQITPWNFDEKVDRKASANRFIKRMTTKDTYLIGEDVLPDESLLYEKFKVLNELNMVRVNGKLLKVADKQAIFQDLFENYKHVSVKKLQNYIKAKTGLPSDPEISGLSDPEHFNNSLGTYNDFKKLFGSKVDEPDLQDDFEKIVEWSTVFEDKKILREKLNEITWLSDQQKDVLESSRYQGWGRLSKKLLTGIVNDQGERIIDKLWNTNKNFMQIQSDDDFAKRIHEANADQMQAVDVEDVLADAYTSPQNKKAIRQVVKVVDDIQKAMGGVAPKYISIEFTRSEDRNPRRTISRQRQLENTLKDTAKSLAKSINPELLSELDNAAKSKKGLTDRLYLYFTQLGKDIYTGEPINIDELNKYDIDHILPQAFIKDNSLDNRVLVLTAVNNGKSDNVPLRMFGAKMGHFWKQLAEAGLISKRKLKNLQTDPDTISKYAMHGFIRRQLVETSQVIKLVANILGDKYRNDDTKIIEITARMNHQMRDEFGFIKNREINDYHHAFDAYLTAFLGRYLYHRYIKLRPYFVYGDFKKFREDKVTMRNFNFLHDLTDDTQEKIADAETGEVIWDRENSIQQLKDVYHYKFMLISHEVYTLRGAMFNQTVYPASDAGKRKLIPVKADRPVNVYGGYSGSADAYMAIVRIHNKKGDKYRVVGVPMRALDRLDAAKNVSDADFDRALKDVLAPQLTKTKKSRKTGEITQVIEDFEIVLGKVMYRQLMIDGDKKFMLGSSTYQYNAKQLVLSDQSVKTLASKGRLDPLQESMDYNNVYTEILDKVNQYFSLYDMNKFRHKLNLGFSKFISFPNHNVLDGNTKVSSGKREILQEILNGLHANPTFGNLKDVGITTPFGQLQQPNGILLSDETKIRYQSPTGLFERTVSLKDL

SEQ ID NO: 476 - protein, 315 aa, Lactobacillus casei
MFKDYLKQLEDDGTAKAIRQLYDRYIDGDDAKPFVREDFVKALTKEVTAHPNAKSPELLERLAQPDFMLKQRNKANGAIPVQMQQRELDQIIKNQSVYYDWLAAPNPVEKHRKSMPYQLDELLNFRIPYYVGPLVTAKEQKAARGGVFAWMVRKDPDGNITPYNFDEKVDREASANTFIQRMKTTDTYLIGEDVLPKQSLLYQSYEVLNELNNVRVNDNKLSFDQKQQVLGELFERHNTVTIKQFVDNLLAHGDYDRIPEVRGLADEKRFLSSLSTYNQLKGILHEAIDDSDKQTDMVDCKINPNAVRTKKISFL

SEQ ID NO: 477 - protein, 236 aa, Lactobacillus casei
MFKDYLKQLEDDGTAKAIRQLYDRYIDGDDAKPFVREDFVKALTKEVTAHPNAKSPELLERLAQPDFMLKQRNKANGAIPVQMQQRELDQIIKNQSVYYDWLAAPNPVEKHRKSMPYQLDELLNFRIPYYVGPLVTAKEQKAARGGVFAWMVRKDPDGNITPYNFDEKVDREASANTFIQRMKTTDTYLIGEDVLPKQSLLYQSYEVLNELNNVRVNDNKLSSSIFKSSATMITNS

SEQ ID NO: 478 - protein, 1389 aa, Lactobacillus casei
MIIRTYELKTITTIAILKMFQLLTGGLSMTKLGKPYGIGVDIGSNSIGFAAVDENSHLIRLKGKTVIGARLFEEGKAAADRRASRTTRRRLSRNRWRLSFLRDFFESHITPTGPNFFMRQKYSEISPKDKARYKYEKRLFNDRTDAEFYQQYPTMYHLRNRLLTDPSKADVREIYFAIHHILKSRGHFLTSGYAKDFNTNKVALNEIFPALQDAYAQVYPDLDITFDENKVNEFKTVLLNEKATPSDTQRALVNLLLAEDGDKDILKQQKQVLTEFAKAVVGLKTKLNVALGTEVDSSEATVWNFSLGQLDDKWAGIESAMTDEGTEILDQIRDLYRARLLNGIVPAGKTLSQAKVDDYAQHHEDLELFKDYLKQLEDDGTAKAIRQLYDRYIDGDDAKPFVREDFVKALTKEVTAHPNAKSPELLERLAQPDFMLKQRNKANGAIPVQMQQRELDQIIKNQSVYYDWLAAPNPVEKHRKSMPYQLDELLNFRIPYYVGPLVTAKEQKAAQGGVFAWMVRKDPDGNITPYNFDEKVDREASANTFIQRMKTTDTYLIGEDVLPKQSLLYQRYEVLNELNNVRVNNEKLSIEQKQQVIRELFERHNSVTIKQFAENLRAHGDYAHIPEIRGLADEKRFLSSLSTYRQLKSLLPDAIDDPAKQADIENIIAWSTVFEDAAIFKTKLKEINWLDSQTITKLSNIRYRGWGQFSHKFLNGLTLGNGHTIIQELFLSNNNLMQILTDETLQKKMTELNADKLKAANINDAIDDAYTSPSNKKALRQVLRVIEDIKRAADGQDPSWLYVETADGGGTPGKRTRARQHQLQEIYANAAHELIDSAVRGELEDKIADKADFNDRLVLYFMQGGRDIYTGTPLNIDQLSSYDIDHILPQSLIKDNSLDNRVLVHAIINREKNATFASTIYAQKMNATWRQWHEAGLISGRKLRNLQMRPDQIDKYASGFVARQLVETRQIIKLTEQIVAAQYPETKIIAVKAGLSHQLREELEFPKNRDVNHYHHAFDAFLAARIGTYLLKRFPNLQAFFTYGKFKKADVKKLRGFNFIRDITHAEDKIVVKDTGEVIWDKKRDVDELDRIYNFKRMLITHEVHFEKADLFKQTVYGAKDSKEAGGKKQLISKKKGYPVDIYGGYTQETGSYLSVVRLTKKAMYAVVKVSTRDAAKLAVAKSISEQKENETLNDIIDEKLSKISKNGKITHELFEVVLPRVGQKTLFKNSKYNLFLVNSDTYMHNYQELWMPREYQKMWKDISLSKYGDAQTEDQLDQIFGFIVSQVNSYFNLYDINQFRKKLNDAADKFATLPMRDTDDMQGKIATIGQLLIGLQANAARSDLRNLDIKTPLGLLQIPNGISLDSDTSVVYQSPTGLLEREVHLSDL

SEQ ID NO: 479 - protein, 412 aa, Lactobacillus casei
MIKDNSLDNRVLVHPLVNREKDTIFASTRFAKQTNGMWRQWHAAGLISSRKLRNLQMRPDEIDKYASGFVARQLVETRQIIKLTEQIVADQYPDTKIIAVKAGLSSQLRKELDFPKNREVNHYHHAFDAFLAARIGTYLLKRYPNLEPFFTYGKFKKTEVKKLKSFNFIRDMTHAKDKIVAKETGEIVWDNASDINELDRIYNFKRMLITHEVRFETASLFKQTLYAAKNPKNRGGSRQLIPKKKGYLVDIYGGYTQETGSYLSVVRLTKKAMYAVVKVSTRDAAKLAVAKSISEQKENETLKKIIDGKLSKTSKKGKTTHQLFEIVLPRVGQKTLFKNSKYNQFLVNSDTYMHNYQELWMPREYQRMWKDILLSNHGDAQIEGQLDQIFKFIVSQVNSYFNLYDINQFRKK

SEQ ID NO: 480 - protein, 234 aa, Lactobacillus casei
MKVTKKTETIFKVVKIATSQVAALNKARSRSTAEELSVLTELLKPKFSKVGKNGKITDTPFEVVLPRVPREQLFYNAKYGFFMVNSDTMFHNFQEIWVSRSDQKILQQIRKAKIDYPNVDQDLDNLFHNLADQIVKYFDLYSIAGFKEKISQSQNTFNDLAVDDTDQSVGKITVINELLKGAQANGMTGSLKVLKISTPFGFTQDKSGVLTKDSSIIYQSPTGLFERSVRLTDL

SEQ ID NO: 481 - protein, 566 aa, Lactobacillus casei
MQILTDEVLKQKIAELNAHELKASGIYAAIDDAYTSPSNKKALRQVLSVIDDITNAAGQAPNWLYIETADGDGVPGKRTNSRQRKIQEIYVNAAQELITSSVRGELEDKIASRADFTDRLVLYFMQGGRDIYTGEPLNIDNLSSYDIDHILPQSLIKDNSLDNRVLVHPLVNREKDTIFASTRFAKQMNGMWRQWHAAGLISSRKLRNLQMRPDEIDKYASGFVARQLVETRQIIKLTEQIVADQYPDAKIIAVKAGLSSQLRKELDFPKNREVNHYHHAFDAFLAARIGTYLLKRYPNLEPFFTYGKFKKTEVKKLKSFNFIRDMTHAKDKIVAKETGEIVWDNASDINELDRIYNFKRMLITHEVRFETASLFKQTLYAAKNSKNRGGSRQLIPKKKGYLVDIYGGYTQETGSYLSVVRLTKKAMYAVVKVSTRDAAKLAVAKSISEQKENETLKKIIDGKLSKTSKKGKTTHQLFEIVLPRVGQKTLFKNSKYNQFLVNSDTYMHNYQELWMPREYQRMWKDILLSNHGDAQLEGQLDQIFKFIVSQVNSYFNLYDINQFRKK

SEQ ID NO: 482 - protein, 1363 aa, Lactobacillus casei
MTKLGKPYGIGVDIGSNSIGFAAVDENSHLIRLKGKTVIGARLFEEGKAAADRRASRTTRRRLSRNRWRLSFLRDFFESHITPTDPNFFMRQKYSEISPKDKARYKYEKRLFNDRTDAEFYQQYPTMYHLRNRLLTDPSKADVREIYFAIHHILKSRGHFLTSGYAKDFNTNKVALNEIFPALQDAYAQVYPDLDITFDENKVNEFKTVLLDEKATPSDTQRALVNLLLAEDGDKDILKQQKQVLTEFAKAVVGLKMKLNVALGTEVDSSEATAWNFSLGQLDDKWAGIESAMTDEGTEILDQIRDLYRARLLNGIVPAGKTLSQAKVDDYEQHHEDLELFKDYLKQLEDDGMAKVIRQLYDRYIDGDDAKPFVREDFVKALTKEVTAHPNAKSPELLERLVQPDFMLKQRNKANGAIPVQMQQRELDQIIKNQSVYYDWLAAPNPVEKHRQSMPYQLDELLNFRIPYYVGPLVTAKEQKAAQGGVFAWMVRKDPDGNITPYNFDEKVDREASANTFIQRMKTTDTYLIGEDVLPKQSLLYQSYEVLNELNNVRVNDNKLSFDQKQQVLGELFERHNTVTIKQFVDNLLAHGDYDRIPEVRGLADEKRFLSSLSTYNQLKGILHEAIDDSDKQTDIEKIIAWSTIFEDKAIFKTKLNEISWLTAGMINSLANIRYRGWGQFSHKLLNELTLSTGRTVFEELLISSHNLMQILTDEVLKQKIAELNAHELKASGIYAAIDDAYTSPSNKKALRQVLSVIDDITNAAGQAPNWLYIETADGDGVPGKRTNSRQRKIQEIYANAAQELITGSVRGELEDKIASRADFTDRLVLYFMQGGRDIYTGEPLNIDNLSSYDIDHILPQSLIKDNSLDNRVLVHPLVNREKDTIFASTRFAKQMNGMWRQWHAAGLISSRKLRNLQMRPDEIDKYASGFVARQLVETRQIIKLTEQIVADQYPDAKIIAVKAGLSSQLRKELDFPKNREVNHYHHAFDAFLAARIGTYLLKRYPNLEPFFTYGKFKKTEVKKLKSLKSFNFIRDMTHAKDKIVAKETGEIVWDNASDINELDRIYNFKRMLITHEVRFETASLFKQTLYAAKNSKNRGGSRQLIPKKKGYLVDIYGGYTQETGSYLSVVRLTKKAMYAVVKVSTRDAAKLAVAKSISEQKENETLKKIIDGKLSKTSKKGKTTHQLFEIVLPRVGQKTLFKNSKYNQFLVNSDTYMHNYQELWMPREYQRMWKDILLSNHGDAQLEGQLDQIFKFIVSQVNSYFNLYDINQFRKKIADATDKFAKLPTHDTDNARGKIATIGQLLIGLQANAMRSDLRNLDIKTPFGLLQIGTGITLDLDTSIIYQSPTGLFEREVPLTDL

SEQ ID NO: 483 - protein, 1360 aa, Lactobacillus casei
MTKLGKPYGIGVDIGSNSIGFAAVDENSHLIRLKGKTVIGARLFEEGKAAADRRASRTTRRRLSRNRWRLSFLRDFFESHITPTDPNFFMRQKYSEISPKDKARYKYEKRLFNDRTDAEFYQQYPTMYHLRTRLLTDPSKADVREIYFAIHHILKSRGHFLTPGYAKDFNTNKVALNEIFPALQDAYAQVYPDLDITFDENKVNEFKTVLLNEKATPSDTQRALVNLLLAEDGDKDILKQQKQVLTEFAKAVVGLKTKLNVALGTEVDSSEATVWNFSLGQLDDKWAGIESAMTDEGTEILDQIRDLYRARLLNGIVPAGKTLSQAKVDDYAQHHEDLELFKDYLKQLEDDGTAKAIRQLYDRYIDGDDAKPFVREDFVKALTKEVTAHPNAKSPELLERLAQPDFMLKQRNKANGAIPVQMQQRELDQIIKNQSVYYDWLAAPNPVEKHRKSMPYQLDELLNFRIPYYVGPLVTAKEQKAAQGGVFAWMVRKDPDGNITPYNFDEKVDREASANTFIQRMKTTDTYLIGEDVLPKQSLLYQSYEVLNELNNVRVNDNKLSFDQKQQVLGELFERHNTVTIKQFVDNLLAHGDYDRIPEVRGLADEKRFLSSLSTYNQLKGILHEAIDDADKQTDIENIIAWSTIFEDKAIFKTKLNEISWLNAGMINSLANIRYRGWGQFSHKLLNELTLSTGRTVFEELLISSRNLMQILTDEVLKQKIAELNAHELKASGIYAAIDDAYTSPSNKKALRQVLSVIDDITNAAGQAPNWLYIETADGDGVPGKRTNSRQRKIQEIYANAAQELITGSVRGELEDKIASRADFTDRLVLYFMQGGRDIYTGEPLNIDNLSSYDIDHILPQSLIKDNSLDNRVLVHPLVNREKDTIFASTRFAKQMNGMWRQWHAAGLISSRKLRNLQMRPDEIDKYASGFVARQLVETRQIIKLTEQIVADQYPDTKIIAVKAGLSSQLRKELDFPKNREVNHYHHAFDAFLAARIGTYLLKRYPNLEPFFTYGKFKKTEVKKLKSFNFIRDMTHAKDKIVAKETGEIVWDNASDINELDRIYNFKRMLITHEVRFETASLFKQTLYAAKNSKNRGGSRQLIPKKKGYLVDIYGGYTQETGSYLSVVRLTKKAMYAVVKVSTRDAAKLAVAKSISEQKENETLKKIIDGKLSKTSKKGKTTHQLFEIVLPRVGQKTLFKNSKYNQFLVNSDTYMHNYQELWMPREYQRMWKDILLSNHGDAQLEGQLDQIFKFIVSQVNSYFNLYDINQFRKKIADATDKFAKLPTHDTDNARGKIATIGQLLIGLQANAMRSDLRNLDIKTPFGLLQIGTGITLDLDTSIIYQSPTGLFEREVPLTDL

SEQ ID NO: 484 - protein, 700 aa, Lactobacillus casei
MTKLGKPYGIGVDIGSNSIGFAAVDENSHLIRLKGKTVIGARLFEEGKAAADRRASRTTRRRLSRNRWRLSFLRDFFESHITPTDPNFFMRQKYSEISPKDKARYKYEKRLFNDRTDAEFYQQYPTMYHLRTRLLTDPSKADVREIYFAIHHILKSRGHFLTSGYAKDFNTNKVALNEIFPALQDAYAQVYPDLDITFDENKVNEFKTVLLDEKATPSDTQRALVNLLLAEDGDKDILKQQKQVLTEFAKAVVGLKTKLNVALGTEVDSSEATAWNFSLGQLDDKWAGIESAMTDEGTEILDQIRDLYRARLLNGIVPAGKTLSQAKVDDYEQHHEDLELFKDYLKQLEDDGMAKAIRQLYDRYIDGDDAKPFVREDFVKALTKEVTAHPNAKSPELLERLVQPDFMLKQRNKANGAIPVQMQQRELDQIIKNQSVYYDWLAAPNPVEKHRQSMPYQLDELLNFRIPYYVGPLVTAKEQKAAQGGVFAWMVRKDPDGNITPYNFDEKVDREASANTFIQRMKTTDTYLIGEDVLPKQSLLYQSYEVLNELNNVRVNDNKLSFDQKQQVLGELFERHNTVTIKQFVDNLLAHGDYDRIPEVRGLADEKRFLSSLSTYNQLKGILHEAIDDSDKQTDIEKIIAWSTIFEDKAIFKTKLNEISWLNAGMINSLANIRYRGWGQFSHKLLNELTLSTGRTVFEA

SEQ ID NO: 485 - protein, 330 aa, Lactobacillus casei
MTKLGKPYGIGVDIGSNSIGFAAVDENSHLIRLKGKTVIGARLFEEGKAAADRRASRTTRRRLSRNRWRLSFLRDFFESHITPTDPNFFMRQKYSEISPKDKNRYKYEKRLFNDRTDAEFYQQYPTMYHLRNRLLTDPSKADVREIYFAIHHILKSRGHFLTPGDAKDFNTNKVALNEIFPALQDAYAQVYPDLDITFDENKMNEFKTVLLNEKATPSDTQRALVNLLLAEDGDKDILKQQKQVLTEFAKAVVGLKTKLNVALGTEVDSSEATAWNFSLGQLDDKWAGIESAMTDEGTEILDQIRDLYRARLLNGIVPAGKTLSQAKVDD

SEQ ID NO: 486 - protein, 330 aa, Lactobacillus casei
MTKLGKPYGIGVDIGSNSIGFAAVDENSHLIRLKGKTVIGARLFEEGKAAADRRASRTTRRRLSRNRWRLSFLRDFFESHITPTDPNFFMRQKYSEISPKDKNRYKYEKRLFNDRTDAEFYQQYPTMYHLRNRLLTDPSKADVREIYFAIHHILKSRGHFLTPGDAKDFNTNKVALNEIFPALQDAYAQVYPDLDITFDENKMNEFKTVLLNEKATPSDTQRALVNLLLAEDGDKDILKQQKQVLTEFAKAVVGLKTKLNVALGTEVDSSEATAWNFSLGQLDDKWAGIESAMTDEGTEILDQIRDLYRARLLNGIVPAGKTLSHAKVDD

SEQ ID NO: 487 - protein, 1361 aa, Lactobacillus casei
MTKLGKPYGIGVDIGSNSIGFAAVDENSHLIRLKGKTVIGARLFEEGKAAADRRASRTTRRRLSRNRWRLSFLRDFFESHITPTGPNFFMRQKYSEISPKDKARYKYEKRLFNDRTDAEFYQQYPTMYHLRNRLLTDPSKADVREIYFAIHHILKSRGHFLTSGYAKDFNTNKVALNEIFPALQDAYAQVYPDLDITFDENKVNEFKTVLLNEKATPSDTQRALVNLLLAEDGDKDILKQQKQVLTEFAKAVVGLKTKLNVALGTEVDSSEATVWNFSLGQLDDKWAGIESAMTDEGTEILDQIRDLYRARLLNGIVPAGNTLSQAKVDDYAQHHEDLELFKDYLKQLEDDGTAKAIRQLYDRYIDGDDAKPFVREDFVKALTKEVTAHPNAKSPELLERLAQPDFMLKQRNKANGAIPVQMQQRELDQIIKNQSVYYDWLAAPNPVEKHRKSMPYQLDELLNFRIPYYVGPLVTAKEQKAAQGGVFAWMVRKDPDGNITPYNFDEKVDREASANTFIQRMKTTDTYLIGEDVLPKQSLLYQRYEVLNELNNVRVNNEKLSIEQKQQVIRELFERHNSVTIKQFAENLRAHGDYAHIPEIRGLADEKRFLSSLSTYRQLKSLLPDAIDDPAKQADIENIIAWSTVFEDAAIFKTKLKEINWLDSQTITKLSNIRYRGWGQFSHKFLNGLTLGNGHTIIQELFLSNNNLMQILTDETLQKKMTELNADKLKAANINDAIDDAYTSPSNKKALRQVLRVIEDIKRAADGQDPSWLYVETADGGGTPGKRTRARQHQLQEIYANAAHELIDSAVRGELEDKIADKADFNDRLVLYFMQGGRDIYTGTPLNIDQLSSYDIDHILPQSLIKDNSLDNRVLVHAIINREKNATFASTIYAQKMNATWRQWHEAGLISGRKLRNLQMRPDQIDKYASGFVARQLVETRQIIKLTEQIVAAQYPETKIIAVKAGLSHQLREELEFPKNRDVNHYHHAFDAFLAARIGTYLLKRFPNLQAFFTYGKFKKADVKKLRGFNFIRDITHAEDKIVVKDTGEVIWDKKRDVDELDRIYNFKRMLITHEVHFEKADLFKQTVYGAKDSKEAGGKKQLISKKKGYPVDIYGGYTQETGSYLSVVRLTKKAMYAVVKVSTRDAAKLAVAKSISEQKENETLNDIIDEKLSKISKNGKITHELFEVVLPRVGQKTLFKNSKYNLFLVNSDTYMHNYQELWMPREYQKMWKDISLSKYGDAQTEDQLDQIFGFIVSQVNSYFNLYDINQFRKKLNDAADKFATLPMRDTDDMQGKIATIGQLLIGLQANAARSDLRNLDIKTPLGLLQIPNGISLDSDTSVVYQSPTGLLEREVHLSDL

SEQ ID NO: 488 - protein, 1128 aa, Lactobacillus casei
MTKLGKPYGIGVDIGSNSIGFAAVDENSHLIRLKGKTVIGARLFEEGKAAAKRRAGRTTRRRLSRNRWRLSFLRDFFESHITPTDPNFFMRQKYSEISPKDKARYKYEKRLFNDRTDAEFYQQYSTMYHLRNRLMTDPSRADVREIYFAIHHILKSRGHFLTPGDAKDFNTNDVALDEIFPALQDAYAQVYPDLGITFDEDKANEFKTILLNEIATSIDTQRALVKLLLAEEDDKDILKQQKQVLTEFAKAVVGLKTKLNLALGTEVDSSEATAWNFSLGQLDDKWAGIESAMTDEGTEILDQIRDLYRARLLNGIVPTGKTLSQAKVDDYTQHHEDLQLFKAYLKQLEDDGTAKAIRQLYDRYIDGDDAAPFLRENFVKALTKDVTAHPNTKSPELLERLAQPDFMLKQRNKANGAIPVQMQQRELDQIIKNQAVYYDWLAAPNPVEKHRKSMPYQLDELLNFRIPYYVGPLVTAKEQKAAQGGVFAWMVRKDPEGNITPYNFDEKVDREASANTFIQRMKTTDTYLIGEDVLPKQSLLYQRYEVLNELNNVRVNNEKLSIEQKQQVIRELFERHNSVTIKQFAENLRAHGDYAHIPEIRGLADEKRFLSSLSTYRQLKSLLPEAIDDPAKQADIENIIAWSTVFEDAAIFKTKLKEISWLGSEAITKLSNIRYRGWGQFSRKFLNGLTLGNGHTIIQELLLSTNNLMQILTDETLQKKMTELNADKLKTANINDAIDNAYTSPSNKKALRQVLRVVDDIKRAADGQDPSWLYVETADGGGTPGKRTRARQHQLQEIYANAAHELIDTAVRGELEDKISDKADFNDRLVLYFMQGGRDIYTGAPLNIDQLSSYDIDHILPQSLIKDNSLDNRVLVHAIINREKNATFASTIYAQKMNATWRQWHEAGLISGRKLRNLQMRPDQIDKYASGFVARQLVETRQIIKLTEQIVAAQYPDTKIIAVKAGLSHQLREELEFPKNRDVNHYHHAFDAFLAARIGTYLLKRFPNLQAFFTYGKFTKADVKKLRGFNFIRDITHAEDKIVAKDTGEVVWDKQRDVDELDRIYNFKRMLITHEVRFETADLFKQTVYGARDSKEAGGSKQLIPKKKDIQLIFMGAISERTRPILPL

SEQ ID NO: 489 - protein, 1366 aa, Lactobacillus casei
MTKLGKPYGIGVDIGSNSIGFAAVDENSHLIRLKGKTVIGARLFEEGKAAAYRRASRTTRRRLSRNRWRLSFLRDFFESHITPTDPNFFMRQKYSEISPKDKARYKYEKRLFNDRTDAEFYQQYPTMYHLRTRLLTDPSKADVREIYFAIHHILKSRGHFLTPGYAKDFNTNKVALNEIFPALQDAYAQVYPDLDITFDENKVNEFKTVLLNEKATPSDTQRALVNLLLAKEGDRDILKQQKQVLTEFAKAVVGLKTKLNVALGTEVDSSEATAWNFSLGQLDDKWAGIESAMTDEGTEILDQIRDLYRARLLNGIVPAGKTLSQAKVDDYAQHHEDLELFKDYLKQLEDDGTAKAIRQLYDRYIDGDDAKPFVREDFVKALTKEVTAHPNAKSPELLERLAQPDFMLKQRNKANGAIPVQMQQRELDQIIKNQAVYYDWLAAPNPVEKHRQSMTYQLDELLNFRIPYYVGPLVTAKEQKAAQGGVFAWMVRKDPDGNITPYNFDEKVDREASANTFIQRMKTTDTYLIGEDVLPKQSLLYQSYEVLNELNNVRVNDNKLSFDQKQQVLGELFERHNTVTIKQFVDNLLAHGDYDRIPEVRGLADEKRFLSSLSTYNQLKGILHEAIDDADKQTDIENIIAWSTIFEDKAIFKTKLNEISWLNAGMINSLANIRYRGWGQFSHKLLNELTLSTGRTVFEELLISSRNLMQILTDEVLKQKIAELNAHELKASGIYAAIDDAYTSPSNKKALRQVLSVIDDITNAAGQAPNWLYIETADGDGVPGKRTNSRQRKIQEIYANAAQELITGSVRGEFEDKIASRADFTDRLVLYFMQGGRDIYTGEPLNIDNLSSYDIDHILPQSLIKDNSLDNRVLVHPLVNREKDTIFASTRFAKQMNGMWRQWHAAGLISSRKLRNLQMRPDEIDKYASGFVARQLVETRQIIKLTEQIVADQYPDTKIIAVKAGLSSQLRKELDFPKNREVNHYHHAFDAFLAARIGTYLLKRYPNLEPFFTYGKFKKTEVKKLKSLKSLKSFNFIRDMTHAKDKIVAKETGEIVWDNASDINELDRIYNFKRMLITHEVRFETASLFKQTLYAAKNSKNRGGSRQLIPKKKGYLVDIYGGYTQETGSYLSVVRLTKKAMYAVVKVSTRDAAKLAVAKSISEQKENETLKKIIDGKLSKTSKKGKTTHQLFEIVLPRVGQKTLFKNSKYNQFLVNSDTYMHNYQELWMPREYQRMWKDILLSNHGDAQIEGQLDQIFKFIVSQVNSYFNLYDINQFRKKIADATDKFAKLPTHDTDNARGKIATIGQLLIGLQANAMRSDLRNLDIKTPFGLLQIGTGITLDLDTSIIYQSPTGLFEREVPLTDL

SEQ ID NO: 490 - protein, 1354 aa, Lactobacillus coryniformis
MTLHYNVGLDIGTNSVGYTIVDDNGKILQVKGKNGYGVRVFKEGATAAERRIFRTTHRRLKRRKWRLRLLQDFFEPYILPQDDGFFIRRKESNLVLNDRDEDTASLFNDRSDRDFYQAYPTIYHLRQALMTEKRQFDVREIYLAMHHIIKYRGHFLLNGTVNNFTNNKIDLHSDFEELNALLLNVIPELKFQIDLDHSTMFQTTLLNTTISRSGRQRDLVKSFYNGSDDKQLAKQQKSVATELLKAILGLKAKFHKLFNLDLLETTEWEFSFDAEDIDDKLAKLEPLMTENQQQVMDILQRIFAAITLNGIVPEGKTLSASKVDSYQKHKQDLKLLKAIAQHSDKKTATVLQTAYNEYINGIASKPLKQEDFYKRLTNAVKKSSDPQVADMLALIDQEKFLPKQRTKENGAIPHQLHQLELERIIDNQKDYYPWLAELNPNQARQKVAKYKLSELVAFRVPYYVGPLIEPEVQQATSNAHFAWMARKEAGPITPWNFDQKVDRNVSAERFIKRMTTKDTYLLAEDVLPLHSLLYQRFIVLNELNNVRVNGQKLTKKQKQAVYQDLFKRQPHVTKKQFKSYLVQTGEFAESSKIEGLANETSFNSGLTTENELRKIFGAQLDEARYQVDFEQIIEWATLFEDAKILRTKLAEITWLTTEQIEKLAGIRYRGWGRFSRKLLAGLRDQNGQQIIDLLWDTPNNFMVIVSQAAFSEAITKENEKLIDRRGAQDVITDLYTSPQNKKALRQVLAIVADVQKAMGGVPPQRIFIEFAREDEKNPRRSVERSRQLEKLYQTISNEFLINSEVRQELKEAVDQKVNFKDRLFLYFLQGGVDLYSGKRINIDQLSHYDIDHILPQSFIKDDSLDNRVLVSQKLNRSKSDSVPLSEFANYKFGPAMQAKWLQLKEAGLLSKRKYDNLTLDPTKLSKFAPLGFVNRQLVETRQVIKLAANLLASEETKVVTIKANMTHQVRKELDFPKNRNVNNYHHAFDAYLTAFVGIFLSKRYPKLKPYFTYGDFQKGNKLPDLKNFNFLYELKNKDRSIDSNTGEIIWDKQRDLAYMNKIYNFKKVTVVHEVLTKSGALYNQTLYKASEDKASGRGTKQLIRKKDNMPTELYGGYTGSTSAFMSIVRLWKKDKPYYKVVGIPTRMAAKLANQAQLLDYLTKKFTTRKLVKKTGDYKTTVERFELVVPKVGFNQLVIDGGQPFMLGSATYQYNARELFISKEAVKALNKQLSTHVDLVQVFDEILVQVNRWFPLYDTNGFREKLSHGRDRFMKLNDSFEEKSDTQIDVLNRILIGFHANAARTNLKILGLGTDLGFMTQQAGIRLTEKAILVHQSPSGLFERKVALRDLKGLR

SEQ ID NO: 491 - protein, 544 aa, Lactobacillus crispatus
KYYLYFMQLGRDAYTGKPINIDEVSQYYDIDHILPQSFIKDDSLNNRVLVAKPINNGKSDGVPLKLFGDNLATGLGITVKQMWNNWADKGLINKAKQNNLFLDPENINKHQASGFIRKQLVETSQIIKLATTILQAEYPKTKIIVVKASSNHYLRNEFDLYKSREVNDYHHAIDAYLTTICGNLLYQAYPKLRPFFVYGQFKKFSSDPKKENEILKKTKNFDFVAKLLGSKAPNEIRSQQGKVLFEKNKIRLQLNKAYNYKYMLVSRDTTTKNQEMFGMTIYPRAERDIAKSRKLIEKRKGFSTDIYGGYTGTAAAYMAIVRINKTKSSQYKVIAVPMTKRAILNKAEKEGNYEKILKQILSPSILYNDKGKRKAGVISFDIIKGKVPYNQVVQDGNKKFLLKSAIYLCNAKQLVLSEEAMRVITGHWLDSDKQDQELLDVYDEILEKIDRYLPLFDIRDFRNKLHKGREKFLKLNAEDKFKAIIQILKGLHDNSDTGELKDIGITVPFGQLQNNSGITLSSDTILVYQSPTGLFEKRVKISSL

SEQ ID NO: 492 - protein, 298 aa, Lactobacillus crispatus
MDELNKISVNGKKLSVSVKQELYEDLFKKNNTVSAKQLKNWLIENQKLPYIKIKGLADQTKFNSSLSTYIKLKKSGLFVDKLDSNEFRDDFEKIIEWSTIFEDKQIYIQKLQTIDWLTAKQIQFLQNIRLQGWGRLSKKLLTAIVDSNGQNIIEQLWNSQQIFMSIVNKADIKGTITDANQDLMHSNSMEDILSEAYTSPANKKMIRQVVKVVHDIQKAASGQAPKQIAIEFARESRRNSKLSQTRGHKLQDIYQKISGDIVNKNLKDKLAEYIKNNQLSVWEKTSFQMNKNDQDFLF

SEQ ID NO: 493 - protein, 279 aa, Lactobacillus crispatus
MNGKKLSVSVKQELYEDLFKKNNTVSAKQLKNWLIENQKLPYIKIKGLADQTKFNSSLSTYIKLKKSGLFVDKLDSNEFRDDFEKIIEWSTIFEDKQIYIQKLQTIDWLTAKQIQFLQNIRLQGWGRLSKKLLTAIVDSNGQNIIEQLWNSQQIFMSIVNKADIKGTITDANQDLMHSNSMEDILSEAYTSPANKKMIRQVVKVVHDIQKAASGQAPKQIAIEFARESRRNSKLSQTRGHKLQDIYQKISGDIVNKNLKDKLAEYIKNNQLNKDKYYTR

SEQ ID NO: 494 - protein, 538 aa, Lactobacillus crispatus
MQLGRDAYTGKPINIDEVSQYYDIDHILPQSFIKDDSLNNRVLVAKPINNGKSDGVPLKLFGDNLATGLGITVKQMWNNWADKGLINKAKQNNLFLDPENINKHQASGFIRKQLVETSQIIKLATTILQAEYPKTKIIVVKASSNHYLRNEFDLYKSREVNDYHHAIDAYLTTICGNLLYQAYPKLRPFFVYGQFKKFSSDPKKENEILKKTKNFDFVAKLLGSKAPNEIRSQQGKVLFEKNKIRLQLNKAYNYKYMLVSRDTTTKNQEMFGMTIYPRAERDIAKSRKLIEKRKGFSTDIYGGYTGTAAAYMAIVRINKTKSSQYKVIAVPMTKRAILNKAEKEGNYEKILKQILSPSILYNDKGKRKAGVISFDIIKGKVPYNQVVQDGNKKFLLKSAIYLCNAKQLVLSEEAMRVITGHWLDSDKQDQELLDVYDEILEKIDRYLPLFDIRDFRNKLHKGREKFLKLNAEDKFKAIIQILKGLHDNSDTGELKDIGITVPFGQLQNNSGITLSSDTILVYQSPTGLFEKRVKISSL

SEQ ID NO: 495 - protein, 206 aa, Lactobacillus crispatus
MQLGRDAYTGKPINIDEVSQYYDIDHILPQSFIKDDSLNNRVLVAKPINNGKSDGVPLKLFGDNLATGLGITVKQMWNNWADKGLINKAKQNNLFLDPENINKHQASGFIRKQLVETSQIIKLATTILQAEYPKTKIIVVKASSNHYLRNEFDLYKSREVNDYHHAIDAYLTTICGNLLYQAYPKLRPFFVYGQFKKFSSDPKKRK

SEQ ID NO: 496 - protein, 857 aa, Lactobacillus crispatus
MTKLNNEYMVGLDIGTNSCGWVATDFDNNILKMHGKRALGSHLFDEGVSAADRRAFRTTRRRIKRRKWRLKLLEEIFDEEMAKVDPNFFARLKESGLSPLDTRKNVSSIVFPTKKMDKQFYKKFPTIYHLRNALMKQDKKFDLRAIYIAIHHIVKYRGNFLSNSSISNFSASKIEIDRFVNELNDLYSIFLPESGVIFDAGNASKVEDIIRNEQMFKLDKIKEIADVLPDTENKSGLKLSKKISKEISKAILGYKAKFEIILQVNVDKTDSSIWNFKLNDENADVNLSEITSDLTDTQLQILDLVRNLFSAISLLNIVDEGSTLSESMIRKYNDHAQDLKLLKTVIKNHSDRKKAHNLQLAYDKYVNNRHFVDVETKKAFPNKHLYRKSDFYEIVKKNLDASKEAVQIRKEIALDKFMPKQRSDENGVIPFQLNQIELDKIIENQGKYYPFLKEINPIKAHRMQAPYKLDELIRFRVPYYVGPMIEPTNSSYPQTRQNQSFAWMVRKAKGRITPWNFDEKVDRQKSANNFIKRLTTKDTYLFGEDVLPANSLLYQKYTVLDELNKISVNGKKLSVSVKQELYEDLFKKNNTVSAKQLKNWLIENQKLPYIKIKGLADQTKFNSSLSTYIKLKKSGLFVDKLDSNEFRDDFEKIIEWSTIFEDKQIYIQKLQTIDWLTAKQIQFLQNIRLQGWGRLSKKLLTAIVDSNGQNIIEQLWNSQQIFMSIVNKADIKGTITDANQDLMHSNSMEDILSEAYTSPANKKMIRQVVKVVHDIQKAASGQAPKQIAIEFARESRRNSKLSQTRGHKLQDIYQKISGDIVNKNLKDKLAEYIKNNQLSVWEKTSFQMNKNDQDFLF

SEQ ID NO: 497 - protein, 857 aa, Lactobacillus crispatus
MTKLNNEYMVGLDIGTNSCGWVATDFDNNILKMHGKRALGSHLFDEGVSAADRRAFRTTRRRIKRRKWRLKLLEEIFDEEMAKVDPNFFARLKESGLSPLDTRKNVSSIVFPTKKMDKQFYKKFPTIYHLRNALMKQDKKFDLRAIYIAIHHIVKYRGNFLSNSSISNFSASKIEIDRFVNELNDLYSIFLPESGVIFDAGNASKVEDIIRNEQMFKLDKIKEIADVLPDTENKSGLKLSKKISKEISKAILGYKAKFEIILQVNVDKTDSSIWNFKLNDENADVNLSEITSDLTDTQLQILDLVRNLFSAISLLNIVDEGSTLSESMIRKYNDHAQDLKLLKTVIKNHSDRKKAHNLQLAYDKYVNNRHFVDVETKKAFPNKHLYRKSDFYEIVKKNLDASKEAVQIRKEIALDKFMPKQRSDENGVIPFQLNQIELDKIIENQGKYYPFLKEINPIKAHRMQAPYKLDELIRFRVPYYVGPMIEPTNSSYPQTRQNQSFAWMVRKAKGRITPWNFDEKVDRQKSANNFIKRLTTKDTYLFGEDVLPANSLLYQKYTVLDELNKISVNGKKLSVSVKQELYEDLFKKNNTVSAKQLKNWLIENQKLPYIKIKGLADQTKFNSSLSTYIKLKKSGLFVDKLDSNEFRDDFEKIIEWSTIFEDKQIYIQKLQTIDWLTAKQIQFLQNIRLQGWGRLSKKLLTAIVDSNGQNIIEQLWNSQQIFMSIVNKADIKGTITDANQDLMHSNSMEDILSEAYTSPANKKMIRQVVKVVHDIQKAASGQAPKQIAIEFARESRRNSKLSQTRGHKLQDIYQKISGDIVNKNLKDKLAEYIKNNQLSVWEKNSFQMNKNDQDFLF

SEQ ID NO: 498 - protein, 347 aa, Lactobacillus crispatus
MVNLKSLVLILKKENEILKKTKNFDFVAKLLGSKAPNEIRSQQGKVLFEKNKIRLQLNKAYNYKYMLVSRDTTTKNQEMFGMTIYPRAERDIAKSRKLIEKRKGFSTDIYGGYTGTAAAYMAIVRINKTKSSQYKVIAVPMTKRAILNKAEKEGNYEKILKQILSPSILYNDKGKRKAGVISFDIIKGKVPYNQVVQDGNKKFLLKSAIYLCNAKQLVLSEEAMRVITGHWLDSDKQDQELLDVYDEILEKIDRYLPLFDIRDFRNKLHKGREKFLKLNAEDKFKAIIQILKGLHDNSDTGELKDIGITVPFGQLQNNSGITLSSDTILVYQSPTGLFEKRVKISSL

SEQ ID NO: 499 - protein, 534 aa, Lactobacillus crispatus
RDAYTDKPINIDEVSQYYDIDHILPQSFIKDDSLNNRVLVAKPINNGKSDGVPLKLFGDNLATGLGITVKQMWNNWADKGLINKAKQNNLFLDPENINKHQASGFIRKQLVETSQIIKLATTILQAEYPKTKIIVVKASSNHYLRNEFDLYKSREVNDYHHAIDAYLTTICGNLLYQAYPKLRPFFVYGQFKKFSSDPKKENEILKKTKNFDFVAKLLGSKAPNEIRSQQGKVLFEKNKIRLQLNKAYNYKYMLVSRDTTTKNQEMFGMTIYPRAERDIAKSRKLIEKRKGFSTDIYGGYTGTAAAYMAIVRINKTKSSQYKVIAVPMTKRAILNKAEKEGNYEKILKQILSPSILYNDKGKRKAGVISFDIIKGKVPYNQVVQDGNKKFLLKSAIYLCNAKQLVLSEEAMRVITGHWLDSDKQDQELLDVYDEILEKIDRYLPLFDIRDFRNKLHKGREKFLKLNAEDKFKAIIQILKGLHDNSDTGELKDIGITVPFGQLQNNSGITLSSDTILVYQSPTGLFEKRVKISSL

SEQ ID NO: 500 - protein, 278 aa, Lactobacillus crispatus
SVNGKKLSVSVKQELYEDLFKKNNTVSAKQLKNWLIENQKLPYIKIKGLADQTKFNSSLSTYIKLKKSGLFVDKLDSNEFRDDFEKIIEWSTIFEDKQIYIQKLQTIDWLTAKQIQFLQNIRLQGWGRLSKKLLTAIVDSNGQNIIEQLWNSQQIFMSIVNKADIKGTITDANQDLMHSNSMEDILSEAYTSPANKKMIRQVVKVVHDIQKAASGQAPKQIAIEFARESRRNSKLSQTRGHKLQDIYQKISGDIVNKNLKDKLAEYIKNNQLNKDKYY

SEQ ID NO: 501 - protein, 277 aa, Lactobacillus crispatus
SVNGKKLSVSVKQELYEDLFKKNNTVSAKQLKNWLIENQKLPYIKIKGLADQTKFNSSLSTYIKLKKSGLFVDKLDSNEFRDDFEKIIEWSTIFEDKQIYIQKLQTIDWLTAKQIQFLQNIRLQGWGRLSKKLLTAIVDSNGQNIIEQLWNSQQIFMSIVNKADIKGTITDANQDLMHSNSMEDILSEAYTSPANKKMIRQVVKVVHDIQKAASGQAPKQIAIEFARESRRNSKLSQTRGHKLQDIYQKISGDIVNKNLKDKLAEYIKNNQLNKDKY

SEQ ID NO: 502 - protein, 1368 aa, Lactobacillus curvatus
MSRPYNIGLDIGTSSIGWSVVDDQSKLVSVRGKYGYGVRLYDEGQTAAERRSFRTTRRRLKRRKWRLGLLREIFEPYITPIDDTFFLRQKQSNLSPKDQRKLYTQTSLFNDRTDRAFYDDYPTIYHLRYRLMTEKRQFDIREIYLAMHHIVKYRGHFLNEAPVSSFKSSEINLVAHFDRLNTIFADLFSESGFQLETDKLAEVKALLLDNQQSASNRQRQALSLIYTPSTNKAVEKQNKAIATELLKAILGLKAKFNVLTGIEAEDVKAWTLTFNAENFDEEMVKLESSLDDNAHQIIESLQELYSGVLLAGIVPENQSLSQAMITKYDDHQKHLKMLKAVREALAPGDRQRLKQAYDQYVDGQENTKAYSKEDFYGDITKALKNNPDHPIVSEIKKLIELDQFMPKQRTKDNGAIPHQLHQQELDRIIENQQQYYPWLAELNPNSKRQTVAKYKLDELVAFRVPYYVGPLITAEQQRQSSDAKFAWLIRKAEGRITPWNFDDKVDRQASANEFIKRMTTTDTYLLAEDVLPKQSLIYQRFEVLNELNGLKIDDQPITTELKQAIFTDLFMQKISVTVKNIQDYLVSEKRYASRPAITGLSDENKFNSRLSTYHDLKMIVGDAVDDVDKQADLEKCIEWSTIFEDGKIYSAKLNEIDWLTDQQRVQLAAKRYRGWGRLSAKLLTQIVNANGQRIMDLLWDTTDNFMRIVHSEDFDKLITEANQMMLAENDVQDVINDLYTSPQNKKALRQILLVVNDIQKAMKGQAPERILIEFAREDEVNSRLSVQRKRQVEQVYQNISNELLNNTEIRNELKDLSNSALSNTRLFLYFMQGGRDMYTGDSLNIDRLSTYDIDHILPQSFIKDNSLDNRVLVSQKMNRSKADQVPTDFTSVELGQKMQIQWEQMLRAGLITKKKYDNLTLNPDHISKYAMKGFINRQLVETRQVIKLATNLLMEQYGEDNIELITVKSGLTHQMRTEFDFPKNRNLNNHHHAFDAYLTAFVGLYLLKRYPKLKPYFVYGEYQKASQQDKWRNFNFLNGLKKDELVDENTEAVIWDKESGLAYLNKIYQFKKILVTRGVHENSGALFNQTLYAAKDDKASGQGGKQLIPAKQDRSTALYGGYSGKTVAYMCIVRIKNKKGDLYKVCGVETSWLAQLKQLTDEDSQKAFLEQKISPQFTKVKKQKGNIIEAVEEFEVIAPHILINQRFFDNGQELTLGSATYKHNEQELILDKTAVKLLNGALPLTQSEELAEQVYDEILDQVMHYFPLYDTNQFRAKLSTGKAAFMKLPWKSQWDGNKMVQVGQQVILDRILIGLHANAAMSDLKVLKMTTPFGMIQQSTGITLSADTQIIYQSPTGLFERRVALRDL

SEQ ID NO: 503 - protein, 669 aa, Lactobacillus delbrueckii
MAKPKDYTIGLDIGTNSVGWVVTDDQNNILRIKGKKAIGARLFTEGKVAAERRSFRTTRRRLSRRRWRIKMLEELFDEEIAKVDPSFFARLHESWISPKDKRKRYSAIVFPSPEEDKKFHESYPTIYHLRDKLMKDDQKHDIREIYIAVHQMIKARGNFLHDESVETYRSGMSSLGGRSERNILSVQTLEELNDLFAENEGTEEVELNVASAEQINDILTGGHLNADSQKEISNLLLPSSFPSFDDKAKEKQVKKLINNVATNISKAWLGYKADFSTILNLAKVDKDQKKIFAFALQGGDEEDKVQELESLLEQSQTDIVDRLIEIRHAIVLSEIVPVGMTLSEAMIDKYDQHKEDLITLKAVIRNTKDKKKAAKLQAIYDLYVKKRHADLAKAMKLTGIKKRSELLDPEELKKGISSLLDDSPEAVEIKQRLEEKTFLPLQRSNNNGVIPNQLHQVELDEIIKKQSKYYPFLAEKNPDESEEAQKKAPTKLDALLTFRVPYYVGPMITKEEQEAQNGHSFAWMVRRDPQDHEAITPWNFEKKVDKMASATQFIKRMTTKDTYLLGEDVLPASSLKYQLFTVLNELNNLRVNGKKLTSDEKEQVIEGLFKKQKTVKADKFVKYWQAKHIGADIKVKGLSDPSKFNSTMSTYIDFKKIFGDQLNDVNRQR

SEQ ID NO: 504 - protein, 544 aa, Lactobacillus delbrueckii
MTGCADYDVDHIMPQSFVKDDSLDNRVLVARAVNNQKSDKVPALLFGNKVVADLGITVREMWDKWQKLGMISKRKLSNLLTDPDALTEYRAQGFIRRQLVETSQVIKLTATILQSEFPDSKIIEVPAKYNSIVRKQFDLYKSREVNDFHHAIDAYLSTIVGNYLYQVYPNLRRMFVYGEFKKFSSNAEESAHDVARRVKSMNFLDDLLRGTHGDNIYCRSTGEIVFNRNDIISKLKQAYSFKQMLVTQEVFTKKSALFDQTVYPSPERDSKKRSGLIPRKKGMDTEIYGGYSGNKDAYFVLAEAVKEKGHTLQIVGVPIRALNTLKNSANYSEKLLEIIKPQVMFNKDTGKPIKGIKDVKILMDKIPCRQPVLEGESYYMLASSKYRYSLKQISLSQMSMKYILDYIDDPNFNKHEMINIDQQDEKECLLSVYDEILEKMDKYLPLFDIRSFRKKLHDGRDAFIALPVASEEKKPGEVDVIRKILKGLHANADITNLAELGFGTAALGALVSTGGIKISDDAVFIYQSPTGLFERRVKVSDLLK

SEQ ID NO: 505 - protein, 1356 aa, Lactobacillus farciminis
MTKKEQPYNIGLDIGTSSVGWAVTNDNYDLLNIKKKNLWGVRLFEEAQTAKETRLNRSTRRRYRRRKNRINWLNEIFSEELAKTDPSFLIRLQNSWVSKKDPDRKRDKYNLFIDGPYTDKEYYREFPTIFHLRKELILNKDKADIRLIYLALHNILKYRGNFTYEHQKFNISNLNNNLSKELIELNQQLIKYDISFPDDCDWNHISDILIGRGNATQKSSNILKDFTLDKETKKLLKEVINLILGNVAHLNTIFKTSLTKDEEKLNFSGKDIESKLDDLDSILDDDQFTVLDAANRIYSTITLNEILNGESYFSMAKVNQYENHAIDLCKLRDMWHTTKNEEAVEQSRQAYDDYINKPKYGTKELYTSLKKFLKVALPTNLAKEAEEKISKGTYLVKPRNSENGVVPYQLNKIEMEKIIDNQSQYYPFLKENKEKLLSILSFRIPYYVGPLQSAEKNPFAWMERKSNGHARPWNFDEIVDREKSSNKFIRRMTVTDSYLVGEPVLPKNSLIYQRYEVLNELNNIRITENLKTNPIGSRLTVETKQRIYNELFKKYKKVTVKKLTKWLIAQGYYKNPILIGLSQKDEFNSTLTTYLDMKKIFGSSFMEDNKNYDQIEELIEWLTIFEDKQILNEKLHSSKYSYTPDQIKKISNMRYKGWGRLSKKILMDITTETNTPQLLQLSNYSILDLMWATNNNFISIMSNDKYDFKNYIENHNLNKNEDQNISDLVNDIHVSPALKRGITQSIKIVQEIVKFMGHAPKHIFIEVTRETKKSEITTSREKRIKRLQSKLLNKANDFKPQLREYLVPNKKIQEELKKHKNDLSSERIMLYFLQNGKSLYSEESLNINKLSDYQVDHILPRTYIPDDSLENKALVLAKENQRKADDLLLNSNVIDRNLERWTYMLNNNMIGLKKFKNLTRRVITDKDKLGFIHRQLVQTSQMVKGVANILDNMYKNQGTTCIQARANLSTAFRKALSGQDDTYHFKHPELVKNRNVNDFHHAQDAYLASFLGTYRLRRFPTNEMLLMNGEYNKFYGQVKELYSKKKKLPDSRKNGFIISPLVNGTTQYDRNTGEIIWNVGFRDKILKIFNYHQCNVTRKTEIKTGQFYDQTIYSPKNPKYKKLIAQKKDMDPNIYGGFSGDNKSSITIVKIDNNKIKPVAIPIRLINDLKDKKTLQNWLEENVKHKKSIQIIKNNVPIGQIIYSKKVGLLSLNSDREVANRQQLILPPEHSALLRLLQIPDEDLDQILAFYDKNILVEILQELITKMKKFYPFYKGEREFLIANIENFNQATTSEKVNSLEELITLLHANSTSAHLIFNNIEKKAFGRKTHGLTLNNTDFIYQSVTGLYETRIHIE

SEQ ID NO: 506 - protein, 1313 aa, Lactobacillus fermentum
MHYLDEIFAPHLQEVDENFLRRLKQSNIHPEDPAKNQAFIGKLLFPDLLKKNERGYPTLIKMRDELPVEQRAHYPVTNIYKLREAMINEDRQFDLREVYLAVHHIMKYRGHFLNNASVDKFKVGRIDFYKSFNVLNEAYEELQNGEGSFTIEPSKVEKIGQLLLDTKMRKLNRQKAVAKLLEVKVADKEETKRNKQIATAMSKLVLGYKADFATVAMANGNEWKIDLSSETSEDEIEKFREELSDAQNDILTEITSLFSQIMLNEIVPNGMSISESMMDRYWTHERQLAEVKEYLATQPASARKEFDQVYNKYIGQAPKERGFDLEKGLKKILSKKENWKEIDELLKAGDFLPKQRTSANGVIPHQMHQQELDRIIEKQAKYYPWLATENPATGERDRHQAKYELDQLVSFRIPYYVGPLVTPEVQKATSGAKFAWAKRKEDGEITPWNLWDKIDRAESAEAFIKRMTVKDTYLLNEDVLPANSLLYQKYNVLNELNNVRVNGRRLSVGIKQDIYTELFKKKKTVKVSDVASLVMAKTRGVNKPSVEGLSDPKKFNSNLATYLDLKSIVGDKVDDNRYQTDLENIIEWRSVFEDGEIFADKLTEVEWLTDQQRSALVKKRYKGWGRLSKKLLTGIVDENGQRIIDLMWNTDQNFMQIVNQPVFKEQIDQLNQKAITNDGMTLREWVESVLDGAYTSPQNKKAIWQVVRVVEDIVKAVGNAPKSISIEFARNEGNKGEITRSRRTQLQKLFEDQAHELVKDTSLTEELEKAPDLSDRYYLYFTQGGKDMYTGDPINFDEISTKYDIDHILPQSFVKDDSLDNRVLVSRAENNKKSDRVPAKLYAAKMKPYWNQLLKQGLITQRKFENLTMDVDQNIKYRSLGFVKRQLVETRQVIKLTANILGSMYQEAGTDIIETRAGLTKQLREEFDLPKVREVNDYHHAVDAYLTTFAGQYLNRRYPKLRSFFVYGEYMKFKHGSDLKLRNFNFFHELMEGDKSQGKVVDQQTGELITTRDEVAKSFDRLLNMKYMLVSKEVHDRSDQLYGATIVTAKESGKLTSPIEIKKKRPVDLYGAYTNGTSAFMTIIKFTGNKPKYKVIGVPTTSAVGLKRVGKPGSESYNQELHRIIKSNPKVKKDFEIVVPHVSYSQLIVDDDCKFTLASDTYQHPATQLVLSKESMEIIADDFKFVKENTATADEQLVRVFDEIVNQMNHYFTIFDQRSNRQKVTKARDKFVSLPTESEYEGAKKTQVGKTEVITNLLMGLHANSAQGDLKVLGLSTFGFFQSSGGLNLSEDAMIVYQSPTGLFERRICLKDI

SEQ ID NO: 507 - protein, 1327 aa, Lactobacillus florum
MTEQQQPYNIGLDIGTSSIGWAVTDQNDKLLHIRGHNGIGVRLFKEGESAAERRGFRTTRRRLSRRRWRLRFLDRIFDAELAKVDPNFLARLKQSNISPLDPNKQMFGNILFDDPQFDDQKFHQQYPTIYHLRSALAQPDAPQADVRLIYLALHHMIKFRGHFLNGAAVEKFHGGQLHLESEFQELNQIFSNQQRDHVQLQTSSLDEVATILKDNQRTPSDRQRELSARLFVPVDKTIDKENKKLATELLKAVLGLKAKFDVILGVEATDPQAFKLQFSSDDFDDKIAELASELTDEANEILTVLQRLYFSLNLADILTNRQTKQVADSISTAMINRYDDHKHHLKMLKELEAQVTQEQRDGLKKAYDEYIDGDKPTIDTFYTNIKKNLDDSELANQIKSLIDLQAFMPKQRSKENGSIPHQLHQRELDQLIEVQGKYYPWLLAAKDKLDALIAFRVPYYVGPMIDPNQSDDPQNTKFAWMVRKEAGEITPWNFEEKVDKTSSATNFIKRMTTTDTYLLGEPVLPKNSLLYQQFTVLNELNKLKVNGKALTVDQKKYLYEHVCKKQRRVTLKKLSDCLMARGDFPMGAIFTGTTDQKNMNNTLKTYQDFQEIFGDEIDNPDRQVDFEKMIEWSAIFEDREIFKLKLAELNWLTSEQLERVSKKRYQGWGRLSQKLLTHIVNENGERIIDQLWNTNQNFMEIMGQDSVKQAIQEHNGANVAQTGINETIDELYTSPQNKKAIRQILLVVDDIKKAVGYAPANIMMEFAREDRDDHRLIASRARQLEKTYQEISKNWFDNESVTQELKDQIKNKTKFTDRLYLYFIQGGIDLYTGHPLNIDQLSSYDIDHILPQSFLLDNSLNNRVLTSQAENRVHKEDRLPGETVANKMRPTWKMMREQGLMTQRKYNNLTLKPDQISKFNNRGQFINRQLVETRQVIKLAADIMSQKYQADQTKVVTVKANLTHHMREKFNFYKSRNVNDYHHAFDAYLTLFVGNWLLKEYPKLQPYFVYGDFAKTGTNNLKSFNFLYRFERDHKLNDKGAIDTDKDQQLGYMKRIYRFKKMLVTKQLETNEGALYGQTLYPAPKNDKKTRNLINSKKNRPSDIYGGYSNENGSFLTLVKLKKGSKYDYRLVAVPVSKISEIKESELATIEKAIAPQFLKSSGKYRDFQVVLSKILINQKVIDDGMIFTIGSKSYKHNAKQVVLSDNSIQIVSTLSRISDKEKLITVFDEIVDITSKYLPWYKVNDVEKTKMLFRQMQDIDEMKKIIDNSLIGLHCNASITDLGKVGLSKYWGRFVLTAGISLTVDAQLIYQSPTGLFEHRVKVSDL

SEQ ID NO: 508 - protein, 1386 aa, Lactobacillus hominis
MTKITEDYIVGLDIGTNSCGWVAMDSKNTILRMHGKTAIGSHLFDAGNSAADRRAFRTTRRRIKRRKWRLKLLEEIFDSHLAKVDPYFFARLKESGLSPLDTRKNVSSIIYPTSLEDKKFYVDNPTIYHLRYKLMTEDRKFDLREVYLAIHHIVKYRGNFLYNTPVKAFEASKIDVKGSLKKLNELYEGLDSEFNVELDSNNALEIENIIRDKKIFKINKVKEINQLLSLKTEDKERTKLMKDVSKQIVNAILGYKTKFETILLKDVSKDEADDWEFKLTDVDADNKFENLIGDLNENEQEILLVIRKLANAITLSNIVEEGKTLSESMKDKYKKHSDDLKLLKQVISDHPDRDKAKKLALAYDLYVNNRHGKILQAKDILEKKKTLSKEDFYKEIKKNLDDSKESQEILDAISLDSFMPKQRTNENGVIPYQLHQLELDKIIENQGKYYPFLKEVNPVSSHLKQAPYKLDELIRFRVPYYVGPLISPNESTKNKQTKKNQNFAWMIRKEQGQITPWNFDQKVDRMASANKFIKRMTTIDTYLLGEDVLPANSLLYQKFTVLNELNNVKINGKRISVPLKQELYNNLFKKNSTVTTNKLKSYLKENYKLIKVEIKGLSDEKKFNSGLTTYNKLKNLKIFDQQIDDPNYNKDFERIIEWSTIFEDKAIYKEKLKTIDWLSDRQIDKLSKIRMQGWGQLSKKLLSQLTDNNGQTIIEQLWDSQNNFMQIVNQADFKDAIAVANQNLLVDTSVEDILNEAYTSPANKKAIRQVVKVVDDIVKATSGKVPKQIAIEFTRDADDNAKISQSRANKLRKVYKEMSNELASETIRNELERVAKDQKLLKDKHYLYFMQLGRDAYTGELIDIDNLEQYDIDHVLPQSFIKDDSLENRVLVKKAVNNGKSDNVPVKLYGNRMATDLGMTIRHMWEKWKEQGLITKTKYNNLIIDPDKINKYESSGFIHRQLVETSQIIKLVSTILQSKYPDTEIIVVKARYNHYLRKRLNLYKSREVNDYHHAIDAYLSAICGNLLYQVYPYLRPFFVYGQYKKFSSEPEKEKIIYDKTRRYNFISQIFENKDNDIISRETKKKVFDKKDIIEKLKRAYNYKYMLVSRETETHDQEMFKMTVYPRLSRDTKKSRNLIPKKKDMPTEIYGGYTNNSDAYMIIARINKKKGPEYRVFGVPMRELVNLRKAEKNGHYKAYLKQVLEPEIMYSKNGKKNKTISSFEIVKAKVPYKQVILDGDKKFMLASSTYVQNAKQLTLSQYSMQAITDNCENDTEEEKALVEAYDEILTNIDKYLPLFDINKFREKLHAGREKFVDLPLAEKKETILQVLNGLHDNAVMPKIKSLGLSTPLGFMQFHTGVSLSENAKLIYQSPTGLFEKRLKISDL

SEQ ID NO: 509 - protein, 270 aa, Lactobacillus iners
MITYLKDNDDITLSFPKDQLINIFKNSNLNSTEKSDQLKPFFGRTNLEKGIIKLLSGGKQDLSNMFRDETLKNSNYKNLKFSDNRFDDERDGYAADLGDRIDLLILLKQIYDASILESMMSQARVSIDGHKYISSAKVCAYEKHKSDLKRLKSLIKKYLPSEYNNIFRKITEKDNYVAYSKSNITNNKREKALKYVKYVDFTKYLTKKLKTIKTQDAEDDQEIFEIKGELEKQSFLPKQRTLDNSIIPYQLHLMELKKYLIINLNIMTFC

SEQ ID NO: 510 - protein, 255 aa, Lactobacillus iners
MITYLKDNDDITLSFPKDQLINIFKNSNLNSTEKSDQLKPFFGRTNLEKGIIKLLSGGKQDLSNMFRDETLKNSNYKNLKFSDNTFDDERDGYAADLGDRINLLILLKQIYDASILESMMSQARVSIDGHKYISSAKVCAYEKHKSDLKRLKSLIKKYLPSEYNNIFRKITEKDNYVAYSKSNITNNKREKALKYVEYVDFTKYLTKKLKTIKTQDAEDDKEIFEIKGELEKQSFLPKQRTLDNSIIPYQLHLME

SEQ ID NO: 511 - protein, 343 aa, Lactobacillus iners
MLAKDDQEGITVKDKIISLLTFRLPYYIGPVNPAVHGKFAWVKRLANGKVTPWNYKEKIDIDASHEEFIKTKLSKCSFLIGCDVLPKNSLLYQKYMVLSELNTIKFNGVNISEKLKDDIYQNLFKNIQKVTKKRLQNYIKEHENIIGDVIVTGIDNAFKQGLVSYLKFKKIIGDKIDDDRYQKVLEKIIRDITLYDECAGKKIKKEYKDSDLFTEDELNKIVKLTFNDWGRLSAELLDQLEGEDTVSGETGKIIEFMQKHNYNLMQLMSKKFTFKYKIDEINKSYYQHDKFNYKSMIDSLYVSPATKRILWQSLKVVHEISKIMKHDPEKIFYRNGTFQRRSS

SEQ ID NO: 512 - protein, 447 aa, Lactobacillus iners
MLYDHKLIGDKKYARLIRSKAFTDDELAGFIARQLVETRQATKETADLLKRLCPKSRIVYAKAQNASIFRQKFDIPKSRTINDLHHAQDAYLNIVVGNIFDTKFTQDPRNFIKNTKDSRNYNLEKIYDYNVERNNYVAWIAPDSKTNGTIANVKCNLSTKDFRVTRPSFYKKGALFNQNLSRKGSNLAPIKEHSPKSNPLKYGGYSGKNNSFFVVVAGKDNKGKDIVKLIPVNTLIYNKMLHCDYKAKQELLTSYVANNFAINNFRIVKDDIKMYSLVKIDGAYYYLVGGTDERIEVKNAMQLLLSKDSIKAVKILEKESKDQFANIKNYKDIDIKLGRTFNEVISKYTNSVFGKSMLISDKYRKDIFKSVDKSILEFNSLNTIAKADNLLKFVTSMRPAGSVDALKMVGLIERIRKSNVISNFNEFKLINQSVTGLFENEEDLLKL

SEQ ID NO: 513 - protein, 667 aa, Lactobacillus iners
MQKHNYNLMQLMSKKFTFKSKIDEINKSYYQHDKFNYKSMIDSLYVSPATKRILWQSLKVVHEISKIMKHDPEKIFIEMARSKEDHPKRKLSRKADLKQVYKDSKKQIISIIGKDKYQDLSNELDNKDDRDLRWDNLYLYYTQLGRSMYSLKPIDISELMNKNLYDQDHIFPKSKKYDDSIENRVLVEKELNVKKSDIYPISDANIIPQKIKGQVESFWKMLYDHKLIGDKKYARLIRSKAFTDDELAGFIARQLVETRQATKETADLLKRLCPKSRIVYAKAQNASIFRQKFDIPKSRTINDLHHAQDAYLNIVVGNIFDTKFTQDPRNFIKNTKDSRNYNLEKIYDYNVERNNYVAWIAPDGETNGTIANVKCNLSTKDFRVTRPSFYKKGALFNQNLSRKGSNLAPIKEHSPKSNPLKYGGYSGKNNSFFVVVAGKDNKGKDIVKLIPVNTLIYNKMLHCDYKAKQELLTSYVANNFAINNFRIVKDDIKMYSLVKIDGAYYYLVGGTDERIEVKNAMQLLLSKDSIKAVKILEKESKDQFANIKNYKDIDIKLGRTFNEVVSKYTNSVFGKSMLISDKYRKDIFKSVEKSILEFNHLDTIGKADNLLKFVTLMRPSGSAHSLKMVGLIERIRKSNVISNFNEFKLINQSVTGLFENEEDLLKL

SEQ ID NO: 514 - protein, 1395 aa, Lactobacillus jensenii; identical to SEQ ID NO: 127

SEQ ID NO: 515 - protein, 1382 aa, Lactobacillus mucosae
MDIGTNSIGWTAIDDHFSLLRVKGKNAIGVRTFKEGETAADRRGFRTARRRLSRRRWRLQFLDEFFAPYLAEVDPNFLARLKQSDISAKDPAKNQEYMGKLLFPDQEAASDGNGYPTLIQMRKAMPAEKAADFPVFNIYQLRYALMNEKRKFDLREIYLAVHHIVKYRGNFLNNTSVDKFKADQIDFNKSFETLNDLFRQVQPIAPFQIDLTKVDELGKLLLDTKQKKLDRQKAVAKLLPLIEDGTDKEIVKAHQQTAREISKLILGYKAKVGLILQNNLDQTLDMSTENSDDQLMQIAEELDDYQMELINQLSLLYSQIMLNEIVPNGETVSASMLNRYYKHRCQLKELKDYGAAQDKKTREQLDHLYAEYIGQIPKDSKFDFTKDLKKLMDKSDLGQKIKDEIEAGDYLPKQRTSANGVIPHQMHQQELDQIIENQKEYYPWLAEPNPVEKNIKNAKYKLDQLVSFRVPYYVGPMITLADQQKTSKASFAWAVRKKAGKITPWNFYDMIDREKSANNFIKRMTNKDTYLLSEDVLPASSLLYQKFTVLNELNNIRVNGRKLQPALKQAIYTDLFQKRKTVNLKTLTNFLAIHEPTLTKPKIEGLSNGRSFNSSLGTYIDMSKILGDSLDDLNYRDDIEKIIEWSTVFEDSEIYGVKLQEIQWLTNEQREKLVRKRYQGWGRLSKKLLTGITDENGQRIIDLMWDTSKNFMQIVHQPVFEEQIAELNQQLLQDADKAPLEVVDDILADAYTSPQNKKAIRQVVKVVADVVKAVGNAPASISIEFARNEDRNKELKNSRRHSIEKLYHETAEKLVKQTNLLEELGNVKDLNDRYYLYFTQAGRDMYDGTPINIDEISTHYEIDHILPQSFLKDNSLDNRVLVKKSENAAKSDRVPAKLYGAKMRAFWKQLKESQLISNRKYLNLTTDPEQVDKYQMQGFVHRQLVETRQIIKLAANIFGSLYPDSAVIETRAELTKQLREKFSLYKVRDVNDYHHAVDAYLTAFAGHYLYQRYPKLRPMFVYGDYAKIYADDLKRLRSVNLFHDLEKDQYNSGTAVNPETKEKIVDVDWLSDYVSKIQHFKYMLISKAVYTQHGQLYGATILPVAQVDKISAPIGIKDDKPVDIYGAYTNEVAAYMAIVRVNGKKPKYKVVSVPVRMLQRLKMAEQKGHDQYMQTLHDVLLRNFTSLKKNRKTGLKEAVVKDFDVLVPCVRYNQLVIDGDTKFTLGSATYQHNAKQLVLCNHSLETLANNFEYVRKHPDEADERMIMLYDDILDQVNHYFTLYDKNKFREKLNAGRDKYLKLPTFSQFENNKKTAIGKSEAIINILRGLHANAAITNLKCLGVSTPFGQLQSPSGIELSENAKLVYQSPTGLFSREVLLKDL

SEQ ID NO: 516 - protein, 1382 aa, Lactobacillus pentosus
MKKIVNYNLGLDIGTSSIGYAAIDDQGRPVRHQNKTVMGVRLFKEGKTAESTRIFRGTRRRLSHRHWRLGYLDRIFDNEIAKVDENFLPRLKASKRARSDEKRSFRGSLLFPETGDDAYYQKYPTIYHLRYALITQKKQFDIRLIYLALHHMIKYRGNFLDTTPVSAFNIHDIDLTDQFASLNDCYQLLDMDFEFQFDLNNIEQVQKLLLDETLSKTKRQAAVSKVLVMSTGNKAFDDQQNGIASEFIKALLGGPFDLSKILNLSVADVKSWKLHMTDKDVDDTLNSLVEELDENHKQIVNLLQMIYSQVMMLGLLNGQQSISASMIERYDDHAKHWAALKKLLPALGEQEQSTIIHAYTAYTGHSRTKQLSRAEFYTKVNSILKKHENIAEATGLIELIDRNEFMPKQRDAVNGVIPHQLHQRELQLIIQNQQKYYPFLAAKAYPDADETMIEQLLSFRVPYYAGPLVDRDFINESSDQEQAMQNTKFSWLKRREAGEITPWNFEQKVDVQETANRFIKRLTTKDTYLMTEDVLPKESLIYQRFEVLNELNAIRINDRRLTAENKQLAFQQLFMAGNTKNVSIKKFRNFVFDSLKFPEKVKITGFAGQHNFLAKLSTYHDFKKIFGERVDHTDLQPDFERIVEWCTIFEDRHIYREKLKEIQWLSQSEIDQLVLIRNHGWGRLSKRLLTGIRDSDGRTVMDQLWFGTDNFMRIISQSDFAAAIANENRTQLNQHGLEDVLDSAFMSPQNKKAIRQVLKVVDDIEQTLGCPPKKVMIEFTRSPDKKKQRTVTRLEKVQQAYKAVADQLAGQSIVSELDQYANTHSKLSDTYYLYFMQLGRDLYSGKPIDIDSPMLDDDHILPRAFMKDNSLDNRALTEKPINNTKAAKFPSKVFGQQKEVTDFWKLLRRCGLMSNIKEKHLYLDPDNVDKWTRRGFIHRQLVETSQVIKIVANILNDRYQQSQTEVLEVPARLGTELRECFGWYKVREVNDYHHVFDAYLAAFIGNYLYRRYPKLQPYFVYGNFAELNKAQLKNIKSFNFLYNITDNKRVVKDIETGQTLWDDQIRQQIQHIYEYKYMLTSHEAFTQHKELYGQTIYPRREFKPGTLKAIKQDQPQELYGGYKNLTAAYMCIVKIQARKRRAAEYRVVRVATESLSALQQAKRLGVQAYERCLRQELVRNNEILRTNADPNSAPREFEVLLDRVLCHQMIISDGQKYLLGSHAYKINCMQLVLSNNSMKILSTSIVKLKQMTNEPLVQVYREILDVVNKYFTLYDVNSFRENLNQFFDKFRTLPITNEYESSKSGKKLIHRGQLETLTLILRGLHANSDKVQYGDQSTLLGGFQTKDGIKLSKDSVIQYTSPAGLNVRTVKLRDLEQKEAQK

SEQ ID NO: 517 - protein, 1361 aa, Lactobacillus pentosus
MNEPYGVGLDIGTNSVGWTVVDMNGRVRKVKGKTALGARLFKEGATAEDRRGFRTTRRRLKRVKWRLRLLREFFDQPISKIDPNFFARRKYSDISPRDPNYNGLAKTLFNDRTDKEFYDDYATIYHLRDKLMTSNRKFDIREIYLAIHHIVKYRGNFLRTGPASQYGSASLHLATSFQKLNDLFAQSEETLNLKLVTDEALLQQIQQILVRTDLSRSEQQRQIWPLMAVLTGASAAEKKRQKNVVVELSKALVGLKAKMNVVTLTEVDAAVVKDWTFTMEESQDKLPEIEEQLSEVGQQIMDEVIQLYASVNLAQLIPAGKRFSQHMVEKYKHHEKNLELLKAYIHSQSDSKRGREIRATYDRYIDGVDSKPVTQEMFYKDLMKYVEADATSNHLAAEIKDEIDSEQFMPKLRTKQNGSIPYQVQQYELDQIISHQKKYYPWLGEENPVAERRGKFPYKLDELVGFRVPYYVGPLITKEDQQATSGAGFAWMVRKADGPITPWNFDQKVDRIASATAFIQRMQTTDTYLIGEDVLPARSLIYQRFMVLNELNNMRVEDRKLAPQQKQRLYNQVFKQHQHVSVKNIQQNLMDAGEYRKTPQITGLADPKGFNSSLSTYHDFKKILLEAIADEHKRADIEKIILWSTTFEDSAIFKQKLEEVAWLTDAQRKQLSGLRYRGWGQLSHKLLTAFKDDKGRSIMDGLWETSDNFMQLRKQPAIETQIKEANQANLTDADIQDTINELYTSPQNKKAIREVMLVLDDIKNAMHGQTPSWIFVEAARGGGVAGRRTQSRSSQIVEAYKGTAKEIVSEKVQHELNEKIKAKADFNTRLVLYFLQNGRDLYTNEAINIDRLSEYDIDHILPQSLVKDDSLDNRVLTSARINREKNDTFASEKFGRKMGAQWRELHRNGLMTQRKLKHLLMRPDEISKHATDFINRQLVETRQVIKLVEELISSEYPAASIVAVKANLTHQFRQTFNFPKLREVNDYHHAFDASLTAFIGMYLLKQYPKLERFFVYGKFAKQPINLTRFNIIRKLAVAEKPIANIETGEILWDKTADIKYFEKLYNYKRLLVTHEVRENYGAMFKQTLFKASYNKSKTLVPKKNHMETSVYGGYSNQETAYLAIVRIPFKSGFKFIVVGIPTRMVAKIKHYQSLGATLNQATHKVIEPKFTKISRKTKQTVISDYEVVLPKVYLDQVVRDQVKGQMYRFSLGSDKEYHNVQELYLPLSIQQAFVGHYDESDDQRSNDLVKVYDAALKQLQRYFPLHLSRNFDQVASQAHQSFEGLKNNVQTSDKQLGKKEVLNSLFVGLHANATRSNLSVLGMSKDFGRIKSNGITLTDQAEIIYQSPTGLFERKVALKDL

SEQ ID NO: 518 - protein, 1358 aa, Lactobacillus pentosus
MNEPYGVGLDIGTNSVGWTVVDMNGRVRKVKGKTALGARLFKEGATAEDRRGFRTTRRRLKRVKWRLRLLREFFDQPISKIDPNFFARRKYSDISPRDPNYNGLAKTLFNDRTDQEFYHDYPTIYHLRDKLMTSDRKFDIREIYLAIHHIVKYRGNFLRTGPASQYGSASLHLATSFQKLNDLFAQSEESLNFKLVTDEAQLQQIQQILVRTDLSRSEQQRQIWPLMVVLMGATAAEKKRQKDFAKELANALVGLKAKLNVVTLTNVDTTVVKDWTFTLEESQDKLPEIEEQLSEVGQQIMDEVIQLYASVNLAQLIPAGKRFSQHMVEKYNHHEKNLELLKAYIHSQSDSKRGREIRATYDRYIDGVKSKPVTQEMFYKDLMKYVEADATSNHLAAEIKDEIDSEQFMPKLRTKQNGSIPYQVQQYELDQIISHQKKYYPWLGEENPVAERRGKFPYKLDELVGFRVPYYVGPLITKEDQQATSGAGFAWMVRKADGPITPWNFDQKVDRIASATAFIQRMQTTDTYLIGEDVLPARSLIYQRFMVLNELNNMRVEDQKLAPRQKQRLYNQVFKQHQHVSVKNIQQNLMDAGEYRETPKITGLADPKGFNSSLSTYHDFKKILPEAIADEHKRADIEKIILWSTTFEDSAIFKQKLEEVAWLTDAQRKQLSGLRYRGWGQLSHKLLTAFKDDNGRSVMDGLWETSDNFMQLRKQPAIETQIKEANQANLTDADIQDTINELYTSPQNKKAIREVMLVLDDIKNAMHGQTPSWIFIEAARGGGVAGRRTQSRSKQIVEAYKSTAKEIVSEKVQHELNEKIKAKADFNTRLVLYFLQNGRDLYTNEAINIDRLSEYDIDHILPQSLVKDDSLDNRVLTSARINREKNDTFASEKFGRKMGAQWRELHRNGLMTQRKLKHLLMRPDEISKHATDFINRQLVETRQVIKLVEELISSEYPSASIVAVKANLTHQFRQTFNFPKLREVNDYHHAFDASLTAFIGMYLLKQYPKLERFFVYGKFAKQPINLTRFNVIRKLAVAEEPIANIETGEILWDKTADIKCFEKLYNYKRLLVTHEVRENYGAMFDQTIFKATDSRKRLIQKKKGFATETYGGYTGRTLAYLAIVKVVTNKDTQYQVVGIPTTMVTQIQQLEASGLTSKQAVTKAIGAMINENNKKLQSYEVLLPKVRFEQVVRDEVKGHIHRFALGTDTYYHNIQELYLPLTIQRAFLGKRNDTDAQTEQNLLTVFETTLAQVNRYFPLYEMNKFKQILNSAQEKFAALPTKNKTVKNKLVTGKDGVLNNLFIGLHANASLGDLKILGMKIGFGKLQVPGGLKLTDQAEIIYQSPTGLFERKVALKDL

SEQ ID NO: 519 - protein, 1358 aa, Lactobacillus plantarum
MKEPYGVGLDIGTNSVGWTVVDASGHVRKIKGQTGIGVRLFKEGAAAADRRGFRTTRRRLKRVKWRLRLLREFFDQPISKVDINFFARRKYSDVSPRDPNYNGLEKTLFNDRSDQDFYHDYPTIYHLREALMTQHRKFDVREIYLAIHHIVKYRGNFLRNDAATAYRSGTLDLQQHFETLNHLFSQADLELNLNLTTDVALLDSIKQTLVRTDISRSDRQKLIMPLLAVLTGATTAEKKRQKAVVTEFAKALVGNKTKIDVLTLTDIDATEAKDWAFSLEENQDKLPGIEDRFSEVGQQIIDEVIRLYASVNLAQLIPEGKRFSQSMVEKYKRHGEDLKLLKAYIRSQSDAKRGRAIRATYDQYIDGVKSKQVTQEAFQKALGKFVDADVDLNSWAAQIKQAIDSEQFMPKLRTKQNGAIPYQVQQNELDQIISNQKEYYPWLGEENPVIKRRGKFPYKLDELFGFRVPYYVGPLITKEMQAATANAGFAWMVRKADGPITPWNFDDKVDRVASATAFIQRMQTTDTYLIGEEVLPARSLIYQRFMVLNELNNIRVDDGQLTPRQKQRLYNQVFKKHKRVTAKNIQDNLVAAREFPTAPRITGLADPKVFNSSLSTYHDLKQVLPEAMSDVRKQADIEKIILWSTIFEDSTIFKQKLTEISWLTAAQLKQLGQLRYRGWGQLLRKLLTGLKDDNNRSIMDGLWETNANFMQLRSQPAIENQIKSANQANLTTADLQDTINELYTSPQNKKAIREVMVVLADIKDAMHGQTPNWIFVEAARGGGVAGRRTQSRSKQIVAAYQGTAQAIVRDQVQRELKEKIKNKANFNTRLVLYFLQNGRDLYTGDAINIDRLSEYDIDHILPQSLVKDDSLDNRVLTNARINREKNDTFASEKFGKKMGAKWKEMHRMGLMTKRKLDHLLMRPDEISKYATGFINRQLVETRQVIKLVEELINAEYPSTAIVSVKANLTHQFRQTFDFPKIREVNDYHHAFDAALTAFIGTYLLKRYPKLERFFVYGKFAKQPVNLTRFNVIRKLAKTDTPITDIDTGEVLWDKLTDIKYFETLYDYKRLLVTREVSENYGAMFDQTLLKASDNGKRLIRKKQSFDTAIYGGYTGKTLAYMAIVKVSTKKDVQYQVVGVPTTMVTQIEQLEQQGMTNKQAVTKVIEPLIAANNKKMLTYEVLLPKVRFEQVVRDRIKGQTHRFALGTDTYYHNIQELYLPLTLQRAFLGKQNESEVQLNQNLLTVFDATLAQVNRYFPLYEMNKFKKILNSARDQIELLEAKNQFVKNKLVLGKQGILTNMFIGLHANASYGDLKVLGVKIDFGKLQVPGGIKLTGDAEIIYQSPTGLFERKIALKDL

SEQ ID NO: 520 - protein, 1361 aa, Lactobacillus rhamnosus
MTKLNQPYGIGLDIGSNSIGFAVVDANSHLLRLKGETAIGARLFREGQSAAERRESRTTRRRLSRTRWRLSFLRDFFAPHITKIDPDFFLRQKYSEISPKDKDRFKYEKRLFNDRTDAEFYEDYPSMYHLRLHLMTHTHKADPREIFLAIHHILKSRGHFLTPGAAKDFNTDKVDLEDIFPALTEAYAQVYPDLELTFDLAKADDFKAKLLDEQATPSDTQKALVNLLLSSDGEKEIVKKRKQVLTEFAKAITGLKTKFNLALGTEVDEADASNWQFSMGQLDDKWSNIETSMTDQGTEIFEQIQEHYRARLLNGIVPAGMSLSQAKVADYGQHKEDLELFKTYLKKLNDHELAKTIRGLYDRYINGDDAKPFLREDFVKALTKEVTAHPNEVSEQLLNRMGQANFMLKQRTKANGAIPVQLQQRELDQIIANQSKYYDWLAKPNPVEKHRASKPYQLDELLTFRIPYYVGPLITPKEQAESRENVFAWMIRKDPSGNITPYNFDEKVDCPASANMFIQRMKNTDTYLIGEDVLPKRSLLYQKYEVLNELNNVSIDGRRLGADQKQRLIREVFERHSSVTIKQVAENLVAHGDFAKRPEIRGLADEKRFLSSLSTYHQLKKILHEAIDDPTKEHDIENIITWSTVFEDAAIFKTELAKISWLDSDTIKALSNIRYRGWGQFSRKLLDGLKLGNGHTVIQELMLSNHNLMQILTDETLKTTMAELNQDKLKADDIEDVINDAYTSPSNKKALRQVLRVVEDIKHAANGQDPSWLYIETADGPGTAGKRTQSRQKQIQTVYANAAQELIDSAVRGELEDKIADKASFTDRLVLYFMQGGRDIYTGAPLNIDQLSHYDIDHILPQSLIKDDSLDNRVLVNATINREKNNVFASTLFASKMAATWRKWHEAGLISGRKLRNLMLRPDEIDKFAHGFVARQLVETRQIIKLTEQIAAAQYPNTKIIAVKAGLSHQLREELDFPKNRDVNHYHHAFDAFLAARIGTYLLKRYPKLAPFFTYGEFAKVDVKKFREFNFIGALTHAKKNIVAKDTGEIVWDKERDIQELDRIYNFKRMLITHEVYFETADLFKQTIYAAKDSKERGGSKQLIPKKQGYPTQVYGGYTRENTAYLAVVKTVEKKADVYRVVRIATSQVAALKEARAQSTVKERELLKKFLTTKFTKIGKNGKKAITPFDIVIPRVPREQLFHNKRYGFFMVNSDTLMHNYQELWMSRSDQQILSKLVKSAKTVENGQVGRLFENIVEQINKYFPLYDINQFRKKLDQSKDIFSKLPLEGNGTTSGKRETIQNILTGAGTGAKNGDLKNLGIKTPFGFLQVPSGIVLDDDTTLIYQSPTGMLNRIVRLSEL

SEQ ID NO: 521 - protein, 1361 aa, Lactobacillus rhamnosus
MTKLNQPYGIGLDIGSNSIGFAVVDANSHLLRLKGETAIGARLFREGQSAAERRESRTTRRRLSRTRWRLSFLRDFFAPHITKIDPDFFLRQKYSEISPKDKDRFKYEKRLFNDRTDAEFYEDYPSMYHLRLHLMTHTHKADPREIFLAIHHILKSRGHFLTPGAAKDFNTDKVDLEDIFPALTEAYAQVYPDLELTFDLAKADDFKAKLLDEQATPSDTQKALVNLLLSSDGEKEIVKKRKQVLTEFAKAITGLKTKFNLALGTEVDEADASNWQFSMGQLDDKWSNIETSMTDQGTEIFEQIQELYRARLLNGIVPAGMSLSQAKVADYGQHKEDLELFKTYLKKLNDHELAKTIRGLYDRYINGDDAKPFLREDFVKALTKEVTAHPNEVSEQLLNRMGQANFMLKQRTKANGAIPVQLQQRELDQIIANQSKYYDWLAKPNPVEKHRASKPYQLDELLTFRIPYYVGPLITPKEQAESRENVFAWMIRKDPSGNITPYNFDEKVDCPASANMFIQRMKNTDTYLIGEDVLPKRSLLYQKYEVLNELNNVSIDGRRLGADQKQRLIREVFERHSSVTIKQVAENLVAHGDFAKRPEIRGLADEKRFLSSLSTYHQLKKILHEAIDDPTKEHDIENIITWSTVFEDAAIFKTELAKISWLDSDTIKALSNIRYRGWGQFSRKLLDGLKLGNGHTVIQELMLSNHNLMQILTDETLKTTMAELNQDKLKADDIEDVINDAYTSPSNKKALRQVLRVVEDIKHAANGQDPSWLYIETADGPGTAGKRTQSRQKQIQTVYANAAQELIDSAVRGELEDKIADKASFTDRLVLYFMQGGRDIYTGAPLNIDQLSHYDIDHILPQSLIKDDSLDNRVLVNATINREKNNVFASTLFASKMAATWRKWHEAGLISGRKLRNLMLRPDEIDKFAHGFVARQLVETRQIIKLTEQIAAAQYPNTKIIAVKAGLSHQLREELDFPKNRDVNHYHHAFDAFLAARIGTYLLKRYPKLAPFFTYGEFAKVDVKKFREFNFIGALTHAKKNIVAKDTGEIVWDKERDIQELDRIYNFKRMLITHEVYFETADLFKQTIYAAKDSKERGGSKQLIPKKQGYPTQVYGGYTRENTAYLAVVKTVEKKADVYRVVRIATSQVAALKEARAQSTVKERELLKKFLTTKFTKIGKNGKKAITPFDIVIPRVPREQLFHNKRYGFFMVNSDTLMHNYQELWMSRSDQQILSKLVKSAKTVENGQVGRLFENIVEQINKYFPLYDINQFRKKLDQSKDIFSKLPLEGNGTTSGKRETIQNILTGAGTGAKNGDLKNLGIKTPFGFLQVPSGIVLDDDTTLIYQSPTGMLNRIVRLSEL

SEQ ID NO: 522 - protein, 1352 aa, Lactobacillus ruminis
MNDNFDLMRVKGKKGIGVRLYNEGQSAAERRMHRTARRRYGRRKWRLRLLEDFFDEHMAEVDDTFFARLKDSNISPKDDKKYRKSLLFPKSKGVTYQDDGEFYKKYPTMYHLRYALMTEHRKFDLREIYLAFHHMVKYRGNFLYDTSVDSFEAKNLDIKGKFDEINDLLSSYTDFYVDNSNAALVESILLEKNTTRKDKSKKIAKLLHVEDKEKGKNKKAKDLATQISNAVLGLKCNFHLIFELQQKYSFDLCSEKTEENIAKLSEVLDENQKMLLMILKEVQDQVMLNAFVPSGMSLSEAMMQKYDDYGEQLKIYHELEHSVSDDSAAKLRGAYRDYNDNIIKRIDGDNKKDTFYKRVKNILTKISKEYVDQDVLESCGKLKKLIDENKLFIRQRTAANGVLPHQLHQIEMRKIIDNQKEYYPWLAEPNPNEKRRVYSKYKVEELIAFRIPYYVGPLVDPNNADKNKEARFSWMVRKKDGEITPWNFYDKVDWAESANNFIERMKSKDTYLLGEDVVPKESMLYQKYEVLNELNNLRINDSGLSDSFEDVKLKQAIYNDLFKKQKIVKITDLQNYLVQNHKYLVKPKISGLADENRFLSSLSTYSDLKTIFGDKVDDRTYFNDFEKMVEYSTVFEDGHDYNQKLDEYTWLTKEEKYKIGKKRYRGWGKLSKKLLTGLRDKNNHTIMDNLWETNRNFMQIQTADEFSKQIAEENERHLKGSVSDAINDMYTSPANKKAIRQVLRVVDDIQKAMGYAPSSISLEFAREDGPSVRTVSRANRMKSIYEKYASEVSEEVMKDLDGVIKDKKGLNDRLYLYFEQQGKDMYSGHPLDFDKVISGQEYDIDHILPQAVIKDDSLDNRVLTTKALNNDVKSKGVPCRMFNGMHSFWKNLYDKGFISRRKFNNLTTNPENIDKYKMKGFVNRQLVETRQIIKLVANVLNDKYQNDDVDIIEVRAELTHDVRKHFKFYKNRNVNDYHHAFDAYLTSFIGHYLFKKYPNLRPLFDYNDFMKVSDNVFKQLRGNNFLGEFLNKTGDIISTDGNFVLNKEEMINKLNKAYAFKKILVTKEVGQRTGAMFNETRYPAPNSRKAALKYRRMPKPDSLISVKDYKNTDIYGGYSGKNDAYMVIVDMGKQYMVVGVPVRYTEKLDKLRIKHSELYRDELRKVLSRDKTLLDSKGNVKRFDIVLDRVLYGQLIEDGNELFTLGSSKYKRNFRQLFLDKQCIEILDSSATPQPTDEELIWVYDQILDKVDKYFELYDINRQRETLRKGRAAFCSLPNISMKKDDVTKKKILNEILVALHANESESNCEKIGKKVFGRLQVPGGIKLSKEAKLIYQSPTGLFERVVYLKDL

SEQ ID NO: 523 - protein, 1339 aa, Lactobacillus salivarius
MERYHIGLDIGTSSIGWAVIGDDFKIKKKKGKNLIGTRLFNEGATAAERRGFRTQRRRLNRRKWRLKLLEEIFDPYMAEVDEYFFARLKSSNLSPKDSNKKYLGSLLFPDKSDSNFYDKYPTIYHLRRDLMEKDEKFDLREIYLAIHHIVKYRGNFLEKVPAKNYKNSGASIGFLLEEVNSLYKDIIGDESIAILNSEKFEDVEKIILDEETRNLDKQKSVGKLLVEDKKKKNIVTAFSKAIFGYKFNIEDLLLIENDEKNKLTFNDENIDDIFNELSHSLDDKQMDLLTKTREIYFKFKLNMIVPTGYTLSESMIEKYEMHKAHLKMYKEFINTLNTKDRKILKNAYSDYINTEKAKAANAQENFYKTVKKIIKDNNSDTAKKIIVLIDEGNFMPKQRTGENGVIPHQLHQIELDRIIENQAKYYPWLAEANPVEKNRKFAKYKLDELVTFRVPYYVGPLIDKTESNKNEKETKFAWMVRKAKGTITPWNFENLVDRTESANRFIKRMTSKDTYIIGEDVLPASSLLYEKFKVLNELNNIKVNEKKLDIEQKQDIYLNLFTTAKNVTKKSLATYLNCSADSISGLSDGEKFNSSLSSYIDLKAILGNIVDDCNKNEDLEKIIEYSTVFEDGNIYKEKLSEISWLTDEQIEKLSNIHFKGWGRLSKKLLTQITNENGERIIDALWNTSNNFMQIINDESIQAKLAEINGKYAGKSDLEDILSEAYTSPQNKKAIRQVMKVVEDIEKAMQCEPTSISIEFTRKKQKSRLTNTRYKKISDVYEKIADEVISEYELRKLQSELDSNANNMRDRYYLYFMQLGRDMYTGEKINIDELHQRYDIDHILPQSFIKDDSINNRVLTRKDVNNKEKSDKTAADLYAVEMSDFWRKLRKQGLITEQKYKNLLTKSDSIDKYAKKGFIKRQLVETSQVVKLVANILQDKYSDTKIIEVRAKLNSNLREEYKLIKNRAVNDYHHAIDGYLTTFIGQYLYKTYPKLRSYFVYNDFKKLDSNYLKHMKKFNFLWQLQDDKTIDIYDNVNNKFVLNVPEMKKYIQKIYNYKYMLVSKEVTTKNGAFYDQTKYNAKTVNLIPIKKNKPTNIYGGYKGKVSSYMMLVKIRKKKEVIYKFVGVPRLWTDELDRLKDTTERKILLNEIAKNSLSKTEQDFEVILDKVYYGQLIIDGNQKYTLGSSEYKYNAMQLHLSKHALEVLAKENVKDAEITDKDLVSVYEEILSVVNKYFELYDINKFRQKLNEGLEIFRKLPVYNVYESNKIKQVGKFEVLNRILMGLHANAMITDLKVLGIKTKLGQMQVNGGIKLSPDAKLIYQSPTGIFSRAVRVKDLG

SEQ ID NO: 524 - protein, 629 aa, Lactobacillus salivarius
MERYHIGLDIGTSSIGWAVTGDDFKIKRKKGKNLIGTRLFKEGNTAAERRGFRTQRRRLNRRKWRLKLLEEIFDPYMAEVDEYFFARLKDSNLSPKDSNKKYLGSLLFPDISDSNFYDKYPTIYHLRRDLMEKDEKFDLREIYLAIHHIVKYRGNFLENVPAKNYKNSGASIGFLLEEVNNLYKDIVGDENVTILNSEKFEDVEKIILDDGIRNLDKQKGVGKLLVEDKKNKNLVTAFSKAIFGYKFNIEDLLLVEGDEKSKLTFNDENIDDIFNELSHSLDDRRMDLLTKTREIYFKFKLNMIVPTGYTLSESMIEKYEIHKAHLKMYKEFINTLNSKDRKILKNAYTDYINNEKAKAANAQENFYKTVKKTIKDNDSDIVKKIIDLIDEGNFMPKQRTGENGVIPHQLHQIELDRIIENQAKYYPWLAEENPVEKNRKFAKYKLDELVTFRVPYYVGPLVDKTESNKNEKETKFAWMVRKSKGTITPWNFENLVDRTESANRFIKRMTSKDTYIIGEDVLPASSLLYEKFKVLNELNNIKVNEKKLDIEQKQNIYLKLFTTTKNVTKKNLATFLNCSIESISGLSDDKKFNSSLSSYIDLKVILGDIVDDYSKNEDLEKIIEYSTIF

SEQ ID NO: 525 - protein, 897 aa, Lactobacillus salivarius
  misc_feature (822)..(822): Xaa can be any naturally occurring amino acid
MLIESDEKNKLTFNDENIDDIFNELSHSLDDNQMDLLTKTREIYFKFKLNMIVPTGYTLSESMIEKYEMHKAHLKMYKEFINTLNAKDRKILKNAYSDYINNEKAKAANAQENFYKTIKKTIKDNNSDTAKKIIGLIDEGNFMPKQRTGENGVIPHQLHQIELDRIIENQAKYYPWLAEENPVEKNRKFAKYKLDELVTFRVPYYVGPLVDKTESNKNEKETKFAWMVRKAKGTITPWNFENLVDRTESANRFIKRMTSKDTYIIGEDVLPASSLLYEKFKVLNELNNIKVNKKKLDVEQKQHVYLDLFTTRKNVTKDNLATSLNCDVESITGLSDNEKFNSSLSSYIDLKAILGNAVDDCNKNKDLEKIIEYSTIFEDGNIYKEKLSEISWLTDEQIEKLSNIHFKGWGRLSKKLLTQITNENGERIIDALWNTSNNFIQIISDESIQAKLAEINGEYADKSNLEDILDEAYTSPQNKKAIRQVMKVVEDIEKAMKCKPTSIAIEFTRRKGKSKLTNTRYKKISETYEKITDELISEYELGKLQSKLDSKANNMRDIYYLYFMQLGRDMYTGEKINIDELHQYYDIDHIFPRSFIKDNSLNNRVLTRKEINNNEKADRTAADLYAVKMGDFWRKLRKQGLITEKKYKNLLTRTDSIDKYTKQSFIKRQLVETSQVVKMAANILQDKYSNTKIIEVRARLNSDLRKEYELIKNREVNDYHHAIDGYLTIFIGQYLYKTYPKLRSYFVYDDFKKLDSNYLKHMDKFNFIWKLEDKKAEDVYDNVNNEFILNVPKMKDYIQKIYNYKYMLISKEVTTESGAFYXZTKYNAKTINLIPIKKDKPTNIYGGYKGKVSSYMMLVKIQKKKEVIYKFVGVPRLWTDELDRLIDTDEKKALLKK

SEQ ID NO: 526 - protein, 1419 aa, Lactobacillus sp.
MAKPQNYTIGLDIGTNSVGWTVTDDQNNILRIKSKKAIGARLFEEGKVAAERRSFRTTRRRLSRRKWRIKLLEELFDEEISKVDPNFFARSHESWISPKDKRERYSAIVFPTPEEDKKFHNEYPTIYHLRDRLMKDDQKHDIREIYVAIHHIMKYRGNFLHDESIETYRSGMSSLGGGDERTILNTKILDDLNDAFADNLATQGISVNSASADQINEIVTSGHLNVDSQKAIAKLLLPTTLSSDDKKQDKKIKKLATDAAKNVASAWLGYKANFAAILNIQEVDKDKKKIYSFALQGADEEDKVETLESVLSQDQIEIVDRIIRIRHAIVLGEIIPVGMTLSEAMIEKYDQHAKDLKNLKTVIRNLKDRKNAVKLQAIYDLYVNNRHADTAKAMKLAGVKKRTELLEPEEFNKSIEKLLDDSPVSAEIKKRIAEKDFLPLQRSNSNGVIPNQLHQIELDEIIKKQSKYYPFLGETNEHASADVARKAPTKLDQLLTFRVPYYVGPLITKEEQEEQDGHSFAWMIRKNPKDHEKITPWNFDEKVDRMASATQFIKRMTTKDTYLLGEDVLPSSSLKYQLFTVLNELNNLRINHKKLTREEKEQVIEDLFKKYKTVKADKFKNYWQKGHAGLDVKIQGMADPEKFNSTMSTYIDLQKIFGDQLDDAQRQNDFEKIIEYSTIFEDRKILGEKLRADFVWLSEDQIKRLCRLRLQGWGRLSLKLLTRLTDADGQNVLERLLNSNDNFMQIVKDPVIKAKIEQKNQKLLRADWSENATESILDEAYTSPQNKKAIRQVMRVVHDIVKACDGNLPAKFAIEFARSQDDDPKRTVARADRLQKIYAQISDEVVSQGVKDQLSGMKSLKDRYYLYFMQGGRDAYTGKPLNIDRLSDYDIDHIMPQSFIKDDSLDNRVLVTRAVNNQKSDNVPVLLYGNHLVADLGITIREMWDRWQKSGMISKRKLANLLTDPATLSEYRAEGFINRQLVETSQVIKLTATILQSEFPDSKIIEVPAKYNSILRKQFDLYKSREVNDYHHAIDAYLSTIVGNYLYQVYPNLRRLFVYGEFKKFSHGEEESSHQAVRRVKSMNFLDDLLRGKHGDDIYCRVTGEVIFSRKDIISKLKQAYSFKQMLVTQEVFTKKSALFDQTVYPSPARDSKTRSGLIPRKQGMDTEIYGGYSGNKDAYFVLAQVVKSKGHTLQVVGVPIRALRALANCSNYSEQLLKIVKAQVLFNKKTGKAKKGISDVRILLDKIPYRQPVLDGSAFYMLGSSTYKYNLKQISLSQQSMKYILDYIDDPNFNKHEMTKIDQQNEKECLLSVYDEILDKMDKYLSLYDINGFRKKLHVGRDKFIKLEVEKQAEAIKNVLRGFHANSDMTKLSDLGLSTSLGFMQASDGIKLSDNAVFIYQSPTGLFERRVKVSDLLK

SEQ ID NO: 527 - protein, 1289 aa, Lactobacillus versmoldensis
MRRRYRRRRNRLNWLDELFADELAKIDPSFLLRMKNSWVSKKESTRKRDPYNLFIDEKYNDVDYFNQYPTIFHLRKELITEDKKVDIRLIYLAIHNIIKYRGNFTLENQNFDISQLSSNFSQQISDFFALFSDFGVIMPEDFDPDKISDILLNPNLSPSGKVSEAIATISPKTNVKAKIKIILLLLVGNNGDLKKLFDLETTEKIAVKLSSRHIDSELPIILSELNEQQENIITIANSIFGSIILKDFLGDETSISAAKVISFEDHKQDLQKLKTMWRETSNKEAVKAGKKAYEDYIGHEDSETFYKKIKKFLEKAQPVDLANKALAEIELENYLPKQRNRNNTVIPYQLNENELIAILDHQEKYYPFLKENRDKILSLLTFRIPYYVGPLQDSNNNRFSWMTRKASGAIRPWNFSEKVNVEQSSNDFIKRMRSTDTYLIGEPVLPKKSLIYQCYEVLSELNNTRVKDGSSNPKRLDVTIKQRIYNEIFKNQKSVSVKVLQNWLIKESYFKSPEISGLADKKKYLSSLSTYIDFKKIFGQRFVDDPVNSPQLEELAEWLTLFEDKKILLIKLQNSKYSYDQATINKLSTMRYQGTGKLSKKLLVDLKTTKKSIGKSGAESLSILDLMWSTKDNFMQIIHDADYTFEQQIKEFNYDTEDELTPLEKVANLHGSPALKRGLNQSIKVVADIVKFMGHDPEKIFIEFTRSDDFSKLTISRYRRIKKQYLEIAKAIKKIPAEFKDIKEYQTQLEENKGKLASERLMLYFLQCGHSLYSNKPIDLNMINSSKYHVDHILPQSYIKDDSLENKALVLASENENKIDNMLISHDIIATNLPRWQALKDQNLMGSKKFADLTRTTVTENQKKGFIQRQLVQTSQIVKNITLILNDLYKNTSCIETRATLSSEFRKAFSNFDETTYHYQFPEFVKNRDVNDFHHAQDAFLACVIGEYQLKKYPKDNLRLVYDQYSKFLDSLKKDTRKKNGRMPRYTQNGFIIGSMFNGKTYVDDNGEIIWDQKIKESIRKTFNYHQFNVVRQTIEQHGKLFNDTIQPHSDRYKLIPLKTNRDPAIYGGYNNDNNAYSVVLDVDGKKKINGIPIRIANQLKSDELDLSSWLENNIKHKKPMTILIDKVPKYQRIINEETGDLLITSANEVINNVQLFLPSMYTALISLLDSTKTEMYSKLLSNYEANILIDIYDYLLTKLKNNYPLYRKEWAKLAEHRDDFIESDLVTQASTLQQLIKFMHADPSNVNLKFGNFKGNRFGRKNGNIKLSKTDFIYESPTGLFKSIKHID

SEQ ID NO: 528 - protein, 1372 aa, Legionella pneumophila
MESSQILSPIGIDLGGKFTGVCLSHLEAFAELPNHANTKYSVILIDHNNFQLSQAQRRATRHRVRNKKRNQFVKRVALQLFQHILSRDLNAKEETALCHYLNNRGYTYVDTDLDEYIKDETTINLLKELLPSESEHNFIDWFLQKMQSSEFRKILVSKVEEKKDDKELKNAVKNIKNFITGFEKNSVEGHRHRKVYFENIKSDITKDNQLDSIKKKIPSVCLSNLLGHLSNLQWKNLHRYLAKNPKQFDEQTFGNEFLRMLKNFRHLKGSQESLAVRNLIQQLEQSQDYISILEKTPPEITIPPYEARTNTGMEKDQSLLLNPEKLNNLYPNWRNLIPGIIDAHPFLEKDLEHTKLRDRKRIISPSKQDEKRDSYILQRYLDLNKKIDKFKIKKQLSFLGQGKQLPANLIETQKEMETHFNSSLVSVLIQIASAYNKEREDAAQGIWFDNAFSLCELSNINPPRKQKILPLLVGAILSEDFINNKDKWAKFKNFWNTHKIGRTSLKSKCKEIEEARKNSGNAFKIDYEEALNHPEHSNNKALIKIIQTIPDIIQAIQSHLGHNDSQALIYHNPFSLSQLYTILETKRDGFHKNCVAVTCENYWRSQKTEIDPEISYASRLPADSVRPFDGVLARMMQRLAYEIAMAKWEQIKHIPDNSSLLIPIYLEQNRFEFEESFKKIKGGSSDKTLEQAIEKQNIQWEEKFQRIINASMNICPYKGASIGGQGEIDHIYPRSLSKKHFGVIFNSEANLIYCSSQGNREKKEEHYLLEHLSPLYLKHQFGTDNVSDIKNFISQNVANIKKYISFHLLTPEQQKAARHALFLDYDDEAFKTITKFLMSQQKARVNGTQKFLGKQIMEFLSTLADSKQLQLEFSIKQITAEEVHDHRELLSKQEPKLVKSRQQSFPSHAIDATLTMSIGLKEFPQFSQELDNSWFINHLMPDEVHLNPVRSKEKYNKPNISSTPLFKDSLYAERFIPVWVKGETFAIGFSEKDLFEIKPSNKEKLFTLLKTYSTKNPGESLQELQAKSKAKWLYFPINKTLALEFLHHYFHKEIVTPDDTTVCHFINSLRYYTKKESITVKILKEPMPVLSVKFESSKKNVLGSFKHTIALPATKDWERLFNHPNFLALKANPAPNPKEFNEFIRKYFLSDNNPNSDIPNNGHNIKPQKHKAVRKVFSLPVIPGNAGTMMRIRRKDNKGQPLYQLQTIDDTPSMGIQINEDRLVKQEVLMDAYKTRNLSTIDGINNSEGQAYATFDNWLTLPVSTFKPEIIKLEMKPHSKTRRYIRITQSLADFIKTIDEALMIKPSDSIDDPLNMPNEIVCKNKLFGNELKPRDGKMKIVSTGKIVTYEFESDSTPQWIQTLYVTQLKKQP

SEQ ID NO: 529 - protein, 907 aa, Leptospira inadai
MAKSIEEIRSIQNEFVVEYSILLKKIKKGEIDKKNDVYKVYQNTIKSSERLEQVLKERLGFQNVSKSYFNNPYSIAQLYNLISVDRSGFSKVCRSCQEENHWRSTLIDTDRGPQAQASKQVSDTGRPFDGQLAMLLDRIAFEIVKLKRIEIERLLSNKNSSKIEVVEIPLLIEENSFNFRYELAELKKLSKKKKDQLKKSVEEFDTKLNSKQERIKAASRELCPYTGKKISKGEIDHILPRSWTQKQFGTALNAEANLIYASREGNQSKGNREYGLNDLDEKYLNIIFGTKEVDSIQRNISDTIDRLDIERGTTRIVFDRLAPNERDCLRHALFIKSLRPKVFELLSGQLKARVNGTQLYLAKRIRSLLLKNQDFITKSLIIKVPSFSFYEPRTVDLPYMRKELAEKFPNLGKQNPQPTGSHIIDAAMVMAYAVETDSGNLSFGSKDKSEGFDSESLSRFLPSNIQFLSIKSKDKTDSKYPYKKPLFKDGVFGERFLPILIAEKGLRVGYTLENSLEVNSENPEEFFNVLKPYLLFKRKPIESNYQTLVAFAQKDKRGYIVLPVNKPKALESISQRKSDPHTSILKNILYTVSRESIPSLIFDKNTLIPEIKSNKVNWGDKLEKKFRIKIEIKLYGKKIADGFIRYPGKTEWEKLLLTEPLKGLVKNKTLTPKWFDSLENLAGLDDHFKDTSNPEAKHKRKSNHYALPVPKGPSGGFRIRRNSFDGYKVYQLYSVDGNSFHAFKIENGWTGKTLLLDIYQNSGNLHSLDYDYENTDISQTALFSKFYKIEFSKEETQKINSKGIKSLYVAPGSSSRQYIRVIFDKQTFSKFIKFQSKFWEFDLITPLPKDKAKDLIESILKIFPEDLRPKKPRNDIHIQNISHDSVQVEYIADGKTQGFGQYFINQN

SEQ ID NO: 530 - protein, 418 aa, Leptospira inadai
MILKSPIAIDLGAKNTGIVYTTYQPNALPTEIHGATIISDNLKLSQVDRRAKRHQRRNYTRMKLARRLVYLIIRYHYRIPEQDLTPEVKTSLQSLLTRRGYTFQSIETEGNELGQAPWGEIEDYFPNVQDYEKSLPIQTVLYHFFSSENLELNKLVPSKEPETKEDKNILKYIREQKEAFESEQNNGARHRLKYFEEIKEDFPRKIKLMECLQKNKIEEKKFLNLIQNISNLQIKPLRAYFNDKDMKEKEIWEPRRLHTYIARWIRSWHIDPKNSSKRLIRQKLLSQLENGKLKIIRDTSIYSPSKDIISFLEEIDPKDTIPPYEDQNNRHPPRCQNLWLDGKILDRYFPGWEQSLWKLIRNEKNNPFEQLITKDFRTDDTISEGKSLSEQIQIYERSHSNIKLDVRAVILQRFLDRS

SEQ ID NO: 531 - protein, 125 aa, Leptospira inadai
MSAYDRSANLDPWSLRLQGKAKKEIKTTESLSKTDLQKASDAYEKIKEILSESDTDQFIKLANRYYLEVADIKKGMWLPTAPERKHKEIPKSIAHEENQDISLFHKCNTKTGSKKRISQVSLEMF

SEQ ID NO: 532 - protein, 1355 aa, Leuconostoc gelidum
MTYSIGLDIGTGSVGWAVIGDDYRLKRAKGKNLIGVRLFDSATTAAERRGYRTTRRRLSRRHWRLRLLNDIFASDLAEQDENFLPRLKYSWVNPDDEQNPQLNSDVANGALFGSSETDKAFHKNYPTIYHLRHELMTDTAKHDLREVYLAIHHIVKYRGNFLNTADKINAENSFNVDLFIAALDEYNEFLETPITSIKDAQLFSDKLTDINARNKSVRVENAMSETYDDKSKIFKAILTALVGNTANFQTIFDLSDLEKDEAKNFKFKLDLEDVETKLDVVRAKLSDEQNAFLEAVLIAYDGITLKMILGDYKSISQSMIESYKSHQRDWKYIKNNVRLNEQKIEPDKNSVKFFKLDPKKLIYPSNLAYLQVISSNEDEHRKGLDYFKTAIQDADILQRIENDTFLPRQRTKRNGVLPYQLHLAELEQIIKKQSKYYPFLANIYTQDNKTENKLIGLLKFRVPYYVGPLVEAEKVTGDGKNHWLIKKELQENTPITPFNFDDVVDKDKSGEQFIKRITGTDSYLIGEPTLPENSLLYQKYNVLQELNNVRNERHQRLPIKVKQDIFEHVFKIDKNVNAKKVMAYLKLNGYGDFQIAGLSDTRTGKFNSNLSSYNYFVDLLGREKTEKIREDRLEEIIEIQTVFEDKILVAKRLSNLDFLTPQEKSKLSAKHYTGWGRLSQKLLTTQFIKTALSEAGDIIPQSHSIIDLLYYTDKNLMEILNDKTFNVRNWLTEQNKGTESGNSLYDQIDALAGPKDIKRGITQVFSIIDDIKKAMGSNPETVYLEFARETQTSRLTNSRLNRVQEIYNSPELKTEFAYLAKKLEAETKESIHDDRLYLYYLQEGRDMYTGKEIPFDQISSNYDIDHIIPQAFTKDDSLDNRVLVNRATNARKSNSPTFTNDIIDNRKSWWQSLVKRGLMSKEKFERLTDKRKTFSENQTNHFIARQLVETRQIIKNVADLIKNNYDGTQAVAIRASLTGEMRRYLDWPKNRDMNDYHHAHDALMMATVGKYVDRRGFFDNGSVSDGAGNAYNLYTKDWLVAARVGTRNDSQRVNPYGFIVGSMNSKAVRQQVNKETGEIVWGNENLDYLRHVLSYKKILVTRRLSGSSGRLYAETLFSPNPKAKLIAQKANRSVALYGGFTKAESAYTALVEFNKKGDRSYKLIKVPMAIANRVNDKQITVTAYIASLNLRDFSRVVLEHLPLGTLIRESDGSEFYAASSEYKHNAKELWAPKEILRSSKKLDKATADNLIDIFDFLTNDKTISNFKFYEKDLLHLKNVRDKFVEASDEIKIKVLSDVIYELHNDAGWRDPFKHIQEKPAWTMLQVKGGIKLSEKAAIVYQSPTGLFETITIVGE

SEQ ID NO: 533 - protein, 883 aa, Leuconostoc pseudomesenteroides
MIGVRLFEGADTAAERRGYRTTRRRLSRRRWRLRLLNDIFASELSKIDENFLPRLKYSWVNKNDTDNVHFGVGVFDNSEQEKAFYQDYPTIYHLRQKLMTDNRQHDLREVYLAIHHIVKYRGHFLNSGEISANSSFDAQKFLELLREFDNTFYPDAVKFLNLDQLDLPDKISSEISDSKISKSERVDRVLQHVQLANSGAKKILKAILNAVVGNSVDSVAMFSLSDLDKEEKKKINHPVTDSKPFKYSDKEVEAKLDELSNLLQDEQKIEFLSLLKLSFDGLTLKMLLGNAKSVSEAMVERYKVHKDDLKFIKENILNSFSKDKKKEFDKYYEAHLAEKDVDNVDKYFKKIIDDSIISKDKKIELLQKIDDHDFLPSQRSKINGAIPHQLHRNELDKIISQQSKYYPFLADSYTQNGKTETKLAGLVNFRVPYYVGPLVSKENADRNNPDGGQNHWVEFKENTSLSNLTPWNFNEIVDKDKSAAKFIERLTGMDTYLIGEPTLPQNSLLYQKYNVLQELNNIRVDNHKLDVKIKQDVFEHLFKTQNSVSAKDVKNYLIANGYAAPSIQITGLSDTNEKTFNSKLSSYNYLVDKLGRTFVESVKSDVLEKIIELQTVFEDKTVLLRQLSMISELTLAQANQLAEKHWTGWGRLSRKLLSSKVVDVNKITNSTFYPATSRQTIIDTLYHTQLNLMEIINNAEDLYGVRQWISEQNKSDSSDTNDVYDQIQELAGDKKIKRGITQSFRILDDIVKAMGGEPERVYLEFARENQQSGVSFSRKNLLSKLYENDSLKQTFKELKSQLESETKENLQNDRLYLYYLQQGRDMYSNDELNIDQLSSYDIDHIIPQAYTKDNSFDNRVLVSSKANRLKRMLLWYPVKLSKK

SEQ ID NO: 534 - protein, 468 aa, Leuconostoc pseudomesenteroides
MKDQGFISKRKFENLTRRGDFSEQQKERFIARALVETRQIIVNVSSLIDSHFNHTKAVAVKSNMTTDMRHYTKVPKNRDINDYHHAHDALFVATVGQYIENKGFMKAGKLSDSVGNEYNRYTKKWIETARKNTNYGRVNPFGFVVGSMQTATRGKLDYETGELKVVKNNYWSKDDLDYLLKVVSYKKILVTTKLQDNKGAMYDANLISAKGSGKKKAQLQISKSKNIDLYGGFNKLQNEYSVLILNHDEYRWLSIPMYARNSSEQYLHDKYPDAKVILNHILVGQPILLSNSSDPQKSKFASLRIATGGDYHNNFEFVPSVDVKKILDNIYLNHSVTDDEYKKVFESLLATLHDKFVFGIHQVMYNKIFDNKYLFDKMPDEAKRNVINSLLKFMNISKNQLGAVGKIGGKVNGVLYGFKTETEKGTSAGQLISNGKMQPHDIFIFQSPTGIFERRVTVAELANVIKDE

SEQ ID NO: 535 - protein, 1103 aa, Listeria innocua
LKLYPGEKSTGMFAQFISLIVGSKGNFQKPFDLIEKSDIECAKDSYEEDLESLLALIGDEYAELFVAAKNAYSAVVLSSIITVAETETNAKLSASMIERFDTHEEDLGELKAFIKLHLPKHYEEIFSNTEKHGYAGYIDGKTKQADFYKYMKTTLENIEGADYFIAKIEKENFLRKQRTFDNGAIPHQLHLEELEAILHQQAKYYPFLKENYDKIKSLVTFRIPYFVGPLANGQSEFAWLTRKADGEIRPWNIEEKVDFGKSAVDFIEKMTNKDTYLPKENVLPKHSLCYQKYLVYNELTKVRYINDQGKTSYFSGQEKEQIFNDLFKQKRKVKKKDLELFLRNMSHVESPTIEGLEDSFNSSYSTYHDLLKVGIKQEILDNPVNTEMLENIVKILTVFEDKRMIKEQLQQFSDVLDGVVLKKLERRHYTGWGRLSAKLLMGIRDKQSHLTILDYLMNDDGLNRNLMQLINDSNLSFKSIIEKEQVTTADKDIQSIVADLAGSPAIKKGILQSLKIVDELVSVMGYPPQTIVVEMARENQTTGKGKNNSRPRYKSLEKAIKEFGSQILKEHPTDNQELKNNRLYLYYLQNGKDMYTGQDLDIHNLSNYDIDHIVPQSFITDNSIDNLVLTSSAGNREKGNDVPPLEIVQKRKVFWEKLYQGNLMSKRKFDYLTKAERGGLTEADKARFIHRQLVETRQITKNVANILHQRFNYGKDDHGNTMKQVRIVTLKSALVSQFRKQFQLYKVRGVNDYHHAHDAYLNGVVANTLLKVYPQLEPEFVYGDYHQFDWFKANKATAKKQFYTNIMLFFAQKDRIIDENGEILWDKKYLDTVKKVMSYRQMNIVKKTEIQKGEFSKATIKPKGNSSKLIPRKTNWDPMKYGGLDSPNMAYAVVIEYAKGKNKLVFEKKIIRVTIMERKAFEKDEKAFLEEQGYRQPKVLAKLPKYTLYECEEGRRRMLASANEAQKGNQQVLPNHLVTLLHHAANCEVSDGKSLDYIESNREMFAELLAHVSEFAKRYTLAEANLNKINQLFEQNKEGDIKAIAQSFVDLMAFNAMGAPASFKFFETTIERKRYNNLKELLNSTIIYQSITGLYESRKRLDD

SEQ ID NO: 536 - protein, 1337 aa, Listeria innocua
MKNMKKPYTIGLDIGTNSVGWAVLTDQYDLVKRKMKIAGDSEKKQIKKNFWGVRLFDEGQTAADRRMARTARRRIERRRNRISYLQGIFAEEMSKTDANFFCRLSDSFYVDNEKRNSRHPFFATIEEEVEYHKNYPTIYHLREELVNSSEKADLRLVYLALAHIIKYRGNFLIEGALDTQNTSVDGIYKQFIQTYNQVFASGIEDGSLKKLEDNKDVAKILVEKVTRKEKLERILKLYPGEKSAGMFAQFISLIVGSKGNFQKPFDLIEKSDIECAKDSYEEDLESLLALIGDEYAELFVAAKNAYSAVVLSSIITVAETETNAKLSASMIERFDTHEEDLGELKAFIKLHLPKHYEEIFSNTEKHGYAGYIDGKTKQADFYKYMKMTLENIEGADYFIAKIEKENFLRKQRTFDNGAIPHQLHLEELEAILHQQAKYYPFLKENYDKIKSLVTFRIPYFVGPLANGQSEFAWLTRKADGEIRPWNIEEKVDFGKSAVDFIEKMTNKDTYLPKENVLPKHSLCYQKYLVYNELTKVRYINDQGKTSYFSGQEKEQIFNDLFKQKRKVKKKDLELFLRNMSHVESPTIEGLEDSFNSSYSTYHDLLKVGIKQEILDNPVNTEMLENIVKILTVFEDKRMIKEQLQQFSDVLDGVVLKKLERRHYTGWGRLSAKLLMGIRDKQSHLTILDYLMNDDGLNRNLMQLINDSNLSFKSIIEKEQVTTADKDIQSIVADLAGSPAIKKGILQSLKIVDELVSVMGYPPQTIVVEMARENQTTGKGKNNSRPRYKSLEKAIKEFGSQILKEHPTDNQELRNNRLYLYYLQNGKDMYTGQDLDIHNLSNYDIDHIVPQSFITDNSIDNLVLTSSAGNREKGDDVPPLEIVRKRKVFWEKLYQGNLMSKRKFDYLTKAERGGLTEADKARFIHRQLVETRQITKNVANILHQRFNYEKDDHGNTMKQVRIVTLKSALVSQFRKQFQLYKVRDVNDYHHAHDAYLNGVVANTLLKVYPQLEPEFVYGDYHQFDWFKANKATAKKQFYTNIMLFFAQKDRIIDENGEILWDKKYLDTVKKVMSYRQMNIVKKTEIQKGEFSKATIKPKGNSSKLISRKTNWDPMKYGGLDSPNMAYAVVIEYAKGKNKLVFEKKIIRVTIMERKAFEKDEKAFLEEQGYRQPKVLAKLPKYTLYECEEGRRRMLASANEAQKGNQQVLPNHLVTLLHHVANCEVSDGKSLDYIESNREMFAELLAHVSEFAKRYTLAEANLNKINQLFEQNKEGDIKAIAQSFVDLMAFNAMGAPASFKFFETTIERKRYNNLKELLNSTIIYQSITGLYESRKRLDD

SEQ ID NO: 537 - protein, 953 aa, Listeria ivanovii
MKKMLANIDGADYFIDQIEEENFLRKQRTFDNGTIPHQLHLEELEAILHQQAKYYPFLRKDYEKIRSLVTFRIPYFIGPLANGQSDFAWLTRKADGEIRPWNIEEKVDFGKSAIDFIEKMTNKDTYLPKENVLPKHSLCYQKYMVYNELTKIRYIDDQGKTHHFSGQEKQQIFNGLFKQQRKVKKKDLERFLYTINHIESPTIEGVEDAFNSSFATYHDLQKGGVTQEILDNPLNADMLEEIVKILTVFEDKRMIKEQLQSFSDVLDGTILKKLERRHYTGWGRLSAKLLTGIRDKHSHLTILDYLMNDDGLNRNLMQLINDSNLSFKSIIEKEQVSTADKGIQSIVAELAGSPAIKKGILQSLKIVDELVGIMGYPPQTIVVEMARENQTTGKGKNNSKPRFISLEKAIKEFGSQILKEHPTDNQCLKNDRLYLYYLQNGKDMYTGKELDIHNLSNYDIDHIIPQSFITDNSIDNRVLVSSTANREKGDNVPLLEVVRKRKAFWEKLYQAKLMSKRKFDYLTKAERGGLTEADKANFIQRQLVETRQITKNVANILYQRFNCKQDENGNEVEQVRIVTLKSTLVSQFRKQFQLYKVREVNDYHHAHDAYLNGVVANTLLKVYPQLEPEFVYGDYHQFDWFKANKATAKKQFYTNIMRFFAKENQIIDKNGEILWDNRYLDTIKKVLSYRQMNIVKKTEIQKGEFSNATVNPKGNSSKLISRKADWNPIKYGGFDGSNMAYSIVIEYEKRKKKTVIKKELIQINIMERVAFEKDQKAFLEEKGYYSPKVLTKIPKYTLYECENGRRRMLGSANEAQKGNQMVLPNHLMTLLYHAKNCEANDGESLAYIEMHREMFAELLAYISEFAKRYTLANDRLEKINMFFEQNKKGDIKVIAKSFDKLKVFNAFGAPRDFEFFETTIKRKRYYNIKELLNATIIYQSITGLYEARKRLED

SEQ ID NO: 538 - protein, 232 aa, Listeria ivanovii
MMSKLILGLDIGISSVGWGVLDESTNEVVDAGVRLFEEATRNGNEDRRGFRSARRLKRRRQHRLERAKGLIENNGFSCTDINKFNPYQARYNAIFGEVTKDELAAALFHLVKRRGTTIDAPEEEVKDVENELSTKMQLEKNAKKLATKYDYICEIQLEKLKENKVVRDHENRFRTEDYVKEARAILENQQEYYPEVTNEFIESYMALIETRRMYYDGPGSEKSPTPYGQYFI

SEQ ID NO: 539 - protein, 300 aa, Listeria monocytogenes
DDGLNRNLMQLINDSNLSFKSIIEKEQVSTTDKDLQSIVADLAGSPAIKKGILQSLKIVDELVSIMGYPPQTIVVEMARENQTTVKGKNNSRPRYKSLEKAIKEFGSQILKEHPTDNQELRNNRLYLYYLQNGKDMYTGQELDIHNLSNYDIDHIVPQSFITDNSIDNLVLTSSAGNREKGDDVPPLEIVRKRKVFWEKLFQGNLMSKRKFDYLTKAERGGLTEADKATFIHRQLVETRQITKNVANILHQRFNNETDNHGNNMEQVRIVMLKSALVSQFRKQFQLYKVREVNDYHHAHD

SEQ ID NO: 540 - protein, 782 aa, Listeria monocytogenes
  misc_feature (722)..(722): Xaa can be any naturally occurring amino acid
IFNDLFKQKRKVKKKDLELFLRNINQIESPTIEGLEDSFNASYATYHDLLKVGMKQEILDNPLNTEMLEDIVKILTVFEDKRMIKEQLQQFSDVLDGVVLKKLERRHYTGWGRLSAKLLVGIRDKQSHLTILEYLMNDDGLNRNLMQLINDSNLSFKSIIEKEQVSTTDKDLQSIVADLAGSPAIKKGILQSLKIVDELVSIMGYPPQTIVVEMARENQTTVKGKNNSRPRYKSLEKAIKEFGSQILKEHPTDNQELKNNRLYLYYLQNGKDIYTGQELDIHNLSNYDIDHIVPQSFITDNSIDNLVLTSSAGNREKGDDVPPLEIVRKRKVFWEKLYQGNLMSKRKFDYLTKAERGGLTEADKARFIHRQLVETRQITKNVANILHQRFNNETDNHGNTMEQVRIVTLKSALVSQFRKQFQLYKVREVNDYHHAHDAYLNGVVANTLLKVYPQLEPEFVYGEYHQFDWFKANKATAKKQFYTNIMLFFAQKERIIDENGEILWDKKYLETIKKVLDYRQMNIVKKTEIQKGEFSKATIKPKGNSSKLIPRKENWDPMKYGGLDSPNMAYAVIIEHAKGKKKIVIEKKLIQINIMERKMFEKDEEAFLEEKGYRHPKVLTKLPKYTLYECEKGRRRMLASANEAQKGNQLVLSNHLVSLLYHAKNCEASDGKSLKYTEAHRETFSELLAQVSEFATRYTLADANLSKINNLFEQNKEGDIKXIAQSFVDLMVFNAMGAPASFKFFEATIDRKRYTNLKELLSSTIIYQSITGLYESRKRLDD

SEQ ID NO: 541 - protein, 1334 aa, Listeria monocytogenes; identical to SEQ ID NO: 123

SEQ ID NO: 542 - protein, 1334 aa, Listeria monocytogenes
MKNPYTIGLDIGTNSVGWAVLTDQYDLVKRKMKVAGNSDKKQIKKNFWGVRLFDDGQTAVDRRMNRTARRRIERRRNRISYLQEIFAVEMANIDANFFCRLNDSFYVDSEKRNSRHPFFATIEEEVAYHKNYRTIYHLREELVNSSEKADLRLVYLALAHIIKYRGNFLIEGALDTKNTSVDEVYKQFIQTYNQVFMSNIEEGALAKVEENTEVASILAGKFTRREKFERILRLYPGEKSTGMFAQFISLIVGNKGNFQKVFNLVEKTDIECAKDSYEEDLEALLAIIGDEYAELFVAAKNTYNAVVLSSIITVTATETNAKLSASMIERFDAHEKELGELKAFIKLHLPKQYQEIFNNAEIDGYAGYIDGKTKQVDFYKYLKTTLENVEGADYFITKIEEENFLRKQRTFDNGVIPHQLHLEELEAILHQQAKYYPFLREGYDKIKSLVTFRIPYFVGPLANGQSEFAWLTRKDDGEIRPWNIEEKVDFGKSAVDFIEKMTNKDTYLPKENVLPKHSLCYQKYMVYNELTKIRYIDDQGKTNYFSGREKQQIFNDLFKQKRKVKKKDLELFLRNINHIESPTIEGLEDSFNASYATYHDLLKVGLKQEILDNPLNTEILEDIVKILTVFEDKRMIKEQLEQFSDVLDGVVLKKLERRHYTGWGRLSAKLLVGIRDKQSHLTILDYLMNDDGLNRNLMQLINDSNLSFKSIIEKEQVSTTDKDLQSIVADLAGSPAIKKGILQSLKIVDELVSIMGYPPQTIVVEMARENQTTGKGKNNSKPRYKSLEKAIKDFGSQILKEHPTDNQELKNNRLYLYYLQNGKDIYTGQELDIHNLSNYDIDHIVPQSFITDNSIDNLVLTSSAGNREKGGDVPPLEIVRKRKVFWEKLYQGNLMSKRKFDYLTKAERGGLTEADKARFIHRQLVETRQITKNVANILHQRFNKETDNHGNTMEQVRIVTLKSALVSQFRKQFQLYKVREVNDYHHAHDAYLNGVVANTLLKVYPQLEPEFVYGEYHQFDWFKANKATAKKQFYTNIMLFFAQKERIIDENGEILWDKKYLETIKKVLDYRQINIVKKTEIQKGEFSKATIKPKGNSSKLIPRKENWDPMKYGGLDSPNMAYAVIIEHAKGKKKIVIEKKLIQINIMERKMFEKDEEAFLEEKGYHQPKVLTKLPKYTLYECEKGRRRMLSSANEAQKGNQLVLSNHLVSLLYHAKNCEASDGKSLKYIEAHRETFSELLAQVSEFATKYTLADANLSKINNLFEQNKEGDIKAIAQSFVDLMAFNAMGAPASFKFFEATIDRKRYTNLKELLSSTIIYQSITGLYESRKRLDD

SEQ ID NO: 543 - protein, 1334 aa, Listeria monocytogenes
MKNPYTIGLDIGTNSVGWAVLTDQYDLVKRKMKVAGNSDKKQIKKNFWGVRLFDDGQTAVDRRMNRTARRRIERRRNRISYLQEIFAVEMANIDANFFCRLNDSFYVDSEKRNSRHPFFATIEEEVAYHKNYRTIYHLREELVNSSEKADLRLVYLALAHIIKYRGNFLIEGALDTKNTSVDEVYKQFIQTYNQVFMSNIEEGALAKVEENTEVASILAGKFTRREKFERILRLYPGEKSTGMFAQFISLIVGNKGNFQKVFNLVEKTDIECAKDSYEEDLEALLAIIGDEYAELFVAAKNTYNAVVLSSIITVTATETNAKLSASMIERFDAHEKELGELKAFIKLHLPKQYQEIFNNAEIDGYAGYIDGKTKQVDFYKYLKTTLENVEGADYFITKIEEENFLRKQRTFDNGVIPHQLHLEELEAILHQQAKYYPFLREGYDKIKSLVTFRIPYFVGPLANGQSEFAWLTRKDDGEIRPWNIEEKVDFGKSAVDFIEKMTNKDTYLPKENVLPKHSLCYQKYMVYNELTKIRYIDDQGKTNYFSGREKQQIFNDLFKQKRKVKKKDLELFLRNINHIESPTIEGLEDSFNASYATYHDLLKVGLKQEILDNPLNTEILEDIVKILTVFEDKRMIKEQLEQFSDVLDGVVLKKLERRHYTGWGRLSAKLLVGIRDKQSHLTILDYLMNDDGLNRNLMQLINDSNLSFKSIIEKEQVSTTDKDLQSIVADLAGSPAIKKGILQSLKIVDELVSIMGYPPQTIVVEMARENQTTGKGKNNSKPRYKSLEKAIKDFGSQILKEHPTDNQELKNNRLYLYYLQNGKDIYTGQELDIHNLSNYDIDHIVPQSFITDNSIDNLVLTSSAGNREKGGDVPPLEIVRKRKVFWEKLYQGNLMSKRKFDYLTKAERGGLTEADKARFIHRQLVETRQITKNVANILHQRFNKETDNHGNTMEQVRIVTLKSALVSQFRKQFQLYKVREVNDYHHAHDAYLNGVVANTLLKVYPQLEPEFVYGEYHQFDWFKANKATAKKQFYTNIMLFFAQKERIIDENGEILWDKKYLETIKKVLDYRQINIVKKTEIQKGEFSKATIKPKGNSSKLIPRKENWDPVKYGGLDSPNMAYAVIIEHAKGKKKIVIEKKLIQINIMERKMFEKDEEAFLEEKGYHQPKVLTKLPKYTLYECEKGRRRMLSSANEAQKGNQLVLSNHLVSLLYHAKNCEASDGKSLKYIEAHRETFSELLAQVSEFATKYTLADANLSKINNLFEQNKEGDIKAIAQSFVDLMAFNAMGAPASFKFFEATIDRKRYTNLKELLSSTIIYQSITGLYESRKRLDD

SEQ ID NO: 544 - protein, 1099 aa, Listeria monocytogenes
MKNPYTIGLDIGTNSVGWAVLTDQYDLVKRKMKVAGNSDKKQIKKNFWGVRLFDDGQTAVDRRMNRTARRRIERRRNRISYLQEIFAVEMANIDANFFCRLNDSFYVDSEKRNSRHPFFATIEEEVAYHKNYRTIYHLREELVNSSEKADLRLVYLALAHIIKYRGNFLIEGALDTKNTSVDEVYKQFIQTYNQVFMSNIEEGALAKVEENTEVASILAGKFTRREKFERILRLYPGEKSTGMFAQFISLIVGNKGNFQKVFNLVEKTDIECAKDSYEEDLEALLAIIGDEYAELFVAAKNTYNAVVLSSIITVTATETNAKLSASMIERFDAHEKELGELKAFIKLHLPKQYQEIFNNAEIDGYAGYIDGKTKQVDFYKYLKTTLENVEGADYFITKIEEENFLRKQRTFDNGVIPHQLHLEELEAILHQQAKYYPFLREGYDKIKSLVTFRIPYFVGPLANGQSEFAWLTRKDDGEIRPWNIEEKVDFGKSAVDFIEKMTNKDTYLPKENVLPKHSLCYQKYMVYNELTKIRYIDDQGKTNYFSGREKQQIFNDLFKQKRKVKKKDLELFLRNINHIESPTIEGLEDSFNASYATYHDLLKVGLKQEILDNPLNTEILEDIVKILTVFEDKRMIKEQLEQFSDVLDGVVLKKLERRHYTGWGRLSAKLLVGIRDKQSHLTILDYLMNDDGLNRNLMQLINDSNLSFKSIIEKEQVSTTDKDLQSIVADLAGSPAIKKGILQSLKIVDELVSIMGYPPQTIVVEMARENQTTGKGKNNSKPRYKSLEKAIKDFGSQILKEHPTDNQELKNNRLYLYYLQNGKDIYTGQELDIHNLSNYDIDHIVPQSFITDNSIDNLVLTSSAGNREKGGDVPPLEIVRKRKVFWEKLYQGNLMSKRKFDYLTKAERGGLTEADKARFIHRQLVETRQITKNVANILHQRFNKETDNHGNTMEQVRIVTLKSALVSQFRKQFQLYKVREVNDYHHAHDAYLNGVVANTLLKVYPQLEPEFVYGEYHQFDWFKANKATAKKQFYTNIMLFFAQKERIIDENGEILWDKKYLETIKKVLDYRQINIVKKTEIQKGEFSKATIKPKGIPAN

SEQ ID NO: 545 - protein, 1334 aa, Listeria monocytogenes
MKNPYTIGLDIGTNSVGWAVLTDQYDLVKRKMKVAGNSDKKQIKKNFWGVRLFDEGETAADRRMNRTARRRIERRRNRISYLQEIFALEMANIDANFFCRLNDSFYVDSEKRNSRHPFFATIEEEVAYHKNYRTIYHLREELVNSSEKADLRLVYLALAHIIKYRGNFLIEGALDTKNTSVDGVYKQFIQTYNQVFISNIEEGTLAKMEENTTVADILAGKFTRKEKLERILQLYPGEKSTGMFAQFISLIVGSKGNFQKVFDLVEKTDIECAKDSYEEDLEALLAIIGDEYAELFVAAKNTYNAVVLSSIITVTDTETNAKLSASMIERFDAHEKDLSELKAFIKLHLPKQYEEIFSNVAIDGYAGYIDGKTKQVDFYKYLKTLLENIEGADYFIAKIEEENFLRKQRTFDNGAIPHQLHLEELEAILHQQAKYYPFLKEAYDKIKSLVTFRIPYFVGPLANGQSDFAWLTRKADGEIRPWNIEEKVDFGKSAVDFIEKMTNKDTYLPKENVLPKHSLYYQKYMVYNELTKVRYIDDQGKTNYFSGQEKQQIFNDYFKQKRKVSKKDLEQFLRNMSHIESPTIEGLEDSFNSSYATYHDLLKVGIKQEVLENPLNTEMLEDIVKILTVFEDKRMIKEQLQQFSDVLDGAVLKKLERRHYTGWGRLSAKLLVGIRDKQSHLTILDYLMNDDGLNRNLMQLINDSNLSFKSIIEKEQVSTTDKDLQSIVADLAGSPAIKKGILQSLKIVDELVSIMGYPPQTIVVEMARENQTTVKGKNNSRPRYKSLEKAIKEFGSQILKEHPTDNQELRNNRLYLYYLQNGKDMYTGQELDIHNLSNYDIDHIVPQSFITDNSIDNLVLTSSAGNREKGDDVPPLEIVRKRKVFWEKLFQGNLMSKRKFDYLTKAERGGLTEADKATFIHRQLVETRQITKNVANILHQRFNNETDNHGNNMEQVRIVMLKSALVSQFRKQFQLYKVREVNDYHHAHDAYLNGVVANTLLKVYPQLEPEFVYGEYHQFDWFKANKATAKKQFYTNIMLFFAQKERIIDENGEILWDKKYLETIKKVLDYRQMNIVKKTEIQKGEFSKATIKPKGNSSKLIPRKENWDPMKYGGLDSPNMAYAVIIEHAKGKKKVVFEKKIIRITIMERKAFEKDEKSFLEKQGYRQPKVLTKLPKYTLYECENGRRRMLASANEAQKGNQQVLKGQLITLLHHAKNCEASDGKSLDYIESNREMFGELLAHVSEFAKRYTLADANLSKINQLFEQNKDNDIKVIAQSFVNLMAFNAMGAPASFKFFEATIERKRYTNLKELLSATIIYQSITGLYEARKRLDG

SEQ ID NO: 546 - protein, 1334 aa, Listeria monocytogenes
MKNPYTIGLDIGTNSVGWAVLTNQYDLVKRKMKVAGNSDKKQIKKNFWGVRLFDDGQTAVDRRMNRTARRRIERRRNRISYLQEIFAVEMANIDANFFCRLNDSFYVDSEKRNSRHPFFATIEEEVAYHKNYRTIYHLREELVNSSEKADLRLVYLALAHIIKYRGNFLIEGALDTKNTSVDGVYEQFIQTYNQVFMSNIEEGTLAKVEENIEVANILAGKFTRREKFERILQLYPGEKSTGMFAQFISLIVGSKGNFQKVFDLIEKTDIECAKDSYEEDLEALLAIIGDEYAELFVAAKNTYNAVVLSSIITVTATETNAKLSASMIERFDAHEKDLGELKAFIKLHLPKQYQEIFNNAAIDGYAGYIDGKTKQVDFYKYLKTILENIEGADYFIAKIEEENFLRKQRTFDNGAIPHQLHLEELEAIIHQQAKYYPFLREDYEKIKSLVTFRIPYFVGPLAKGQSEFAWLTRKADGEIRPWNIEEKVDFGKSAVDFIEKMTNKDTYLPKENVLPKHSLCYQKYMVYNELTKVRYIDDQGKTNYFSGQEKQQIFNDLFKQKRKVKKKDLELFLRNINHIESPTIEGLEDSFNASYATYHDLLKVGMKQEILDNPLNTEMLEDIVKILTVFEDKPMIKEQLQQFSDVLDGGVLKKLERRHYTGWGRLSAKLLVGIREKQSHLTILDYLMNDDGLNRNLMQLINDSNLSFKSIIEKEQVSTTDKDLQSIVADLAGSPAIKKGILQSLKIVDELVSIMGYPPQTIVVEMARENQTTGKGKNNSKPRYKSLEKAIKEFGSKILKEHPTDNQELKNNRLYLYYLQNGKDMYTGQELDIHNLSNYDIDHIVPQSFITDNSIDNLVLTSSAGNREKGGDVPPLEIVRKRKVFWEKLYQGNLMSKRKFDYLTKAERGGLTDADKARFIHRQLVETRQITKNVANILHQRFNNETDNHGNTMEQVRIVTLKSALVSQFRKQFQLYKVREVNDYHHAHDAYLNGVVANTLLKVYPQLEPEFVYGEYHQFDWFKANKATAKKQFYTNIMLFFGQKERIIDENGEILWDKKYLETIKKVLDYRQMNIVKKTEIQKGEFSKATIKPKGNSSKLIPRKENWDPMKYGGLDSPNMAYAVIIEHAKGKKKLIFEKKIIRITIMERKMFEKDEEAFLEEKGYRHPKVLTKLPKYTLYECEKGRRRMLASANEAQKGNQLVLSNHLVSLLYHAKNCEASDGKSLKYIEAHRETFSELLAQVSEFATRYTLADANLSKINNLFEQNKEGDIQAIAQSFVDLMAFNAMGAPASFKFFEATIDRKRYTNLKELLSSTIIYQSITGLYESRKRLDD

SEQ ID NO: 547 - protein, 874 aa, Listeria seeligeri; identical to SEQ ID NO: 189

SEQ ID NO: 548 - protein, 1087 aa, Listeriaceae bacterium
MKKLVLGLDIGVASVGWGIIDAENGDVVDTGVRLFSSRDASENESRRTSRQSRRLSRRKKHRRERIKQLLLAHDMDICDIVNENPYELRVKGLNEKLEVSEIYVALTHLAKRRGVSYLDDVVEEGGTIKSEHLNKNMEEIKSGKMPCEIQLERFEKYGQVRGMIEINQDTEESSFLVNIFRTSDYIKEAKTILATQQKFHKQITNEFIDEYIHIMASKRDYFIGPGNEKSRTDYGVYRTNGDTWDNLFEILIGKCSVFPEETRAARSSYVAQEFNLLNDLNNLKISNLESGKLSASQKHDIVEKVKNSKKFGTKDLLKYIASVCECKIEDIGGCRVDKNRKPIMHTFENYRKVHNALNEAGVDLRLSETDYDELMKIMTLNSETLEIKKQCKEKLPQLTEDYLNVCLVLNKKGAFSGWHALSLKAMKLMMPELYGTSKNQMQIIHTMQLGKAYLKPLNQQKYLNSEAILEEIYNPIAARSIRQTIKVTNAILKKYGHLDSVIIEMPRDYQTSEDERKMIEKMQKENEKEKKAALKRAREEYPFPDEAFRNHKELATKLRLWYQQDQFCVYSGRKISVVDLVRNPNQFEIDHIIPQSVSLDDSLNNKVLCFSEENQKKGQQTPFYYHKGKSGNWTYEQYKLFVEKLFDKKKISNKKRELLLFEEDINKWDVRRGFIARNLVDTRYASRVILNSYQQYFGNHEMGTKVKVVRGKFTSQLRKKWRIFKDRNESHSHHAIDALIVAATANLRLWKKNTLGVSDEGKVYDKETGEILPFEKLTESEYNEMMNKEPYLNFKTKLQNIETKVKYSYRVSKKVNRKISDATIYSTRERDGIDYIVGKIKNIYDVKTYKDQFLKRYKKNKEQFLMYQHDPQTFAILENIMATYQDAENPFLAYKKEYGVIRKYSKKGGGSPVTSLKFIDKVLGQKIDLTAKNQAALPKNKKVVLQSITPYRADVYYDEIDKRYHLIGVKYSLFSFSKQGYVINPIAYQKLLEKEQIHSEMKFCFSLYREDIIEFGEDPDSLTRYRFWSKNESGKNKIEVKPIEKPNFEKQTVLTITKKIKILNKYQTDVLGNSFKAQEEKDPRNIE

SEQ ID NO: 549 - protein, 1345 aa, Marinilabilia sp.
MKKILGLDLGTTSIGWAFIKEPEKDVVGSEIVDMGVRIVALSSDEENDFAKGNTISINADRTLKRGARRNLQRFKLRRDALLEIFKEMKLIPSNFKYAEDGPSSTFSTLKLRDKAAKEKIELDDLVKVLLQINKKRGYRSSRKAKSEEDDGSAIDSMGIAKELYENDLTPGQWVFEALQKGRKNVPDFYRSDLQEEFKKIVNYQSEFYPDVLNSSFVEDWMGKASTPTKQYFNKKGVHLAENKGKREERRLQEYNWRAVAVNSKIDLSEIALILSQINSQISNSSGYLGAISDRSKELYFKNQTVGQYLYQQIKINPHTRLKGQVFYRQDYLDEFEKIWSVQSGFHPQLNDALKKEIRDITIFFQRRLKSQKHLISNCEFEDYHKVVPKSHPIFQEFRIWQNLNNLTLIKKDNLNEKSELALEDKIALANELAFKREQSVKDALNILGLKSSEWEFNFTKIEGNRTNHAFFEAFAKIIEIEDGEPLDLGNLKADDILDQFSEAFLRIGIDPGLLQVNNDIEGPNYEKQPYIQFWHLLYSSEDDQKLKQNLIKKFGFKPDHAKILASISLQDDHASLSSRAIKKILPHLQSGLIYDKACTYAGYNHSSSFTKEENEKRELSSELDLLKKNSLRNPVVEKILNQMINVVNAILKDPNLGKPDEIRVEMARELKANAEQRKNMTSNIASATRDHEKYREILKKEFGLKRVTKNDLLRYKLWLETDGISLYTGKPIEASKLFSKEYDIEHIIPKTRLFDDSFSNKTICERQLNIDKANVTAFSFLQNKLSGDEFEQYQSRVKSLFGKLSKAKIQKLLMANDKIPEDFIARQLQETRYISKKAKEILFEITRRVSVTTGTITDKLREDWGLVEIMKELNWEKYDKLGLTYTIEGKHGERLNKIKDWSKRNDHRHHAMDALTVALTKPAYIQYLNNLNAKELNGKKSTEIFAIEQKYLKRENGKLCFIPPVENIRTEAKKHLSKVLISYKAKNKVVTINKNRTNKKAGFNEQIALTPRGQLHKETVYGKAFHYSTKFEKIGASFDVQKINAVAKKEEREALLKRLAENGDDPKKAFTGKNSLSKMPIYLDLKRNIKLPEKVKTVVLEQNYTIRKNIDPDLKLDKVIDVGVKRILENRLKEFGGNAKLALSNLDENPIWLNKEKGITIKRVKISGVSNVESLHVKKDHFGEPILDQVGNEIPVDFVSTGNNHHVAIYEDEKGNLQEEVVSFFEAVVRQNQGLPIINKNHSLGWKFLFTLKQNEYFVFPSDDFDPTDVDLMDEENYHLISPNLFRVQKFTTKDYFFRHHLETTVEDKSELKGVSFKRLGLPGLNCIKKIRINHLGKIIQVGEY

SEQ ID NO: 550 - protein, 1091 aa, Mobiluncus mulieris
MDSRKYRVGIDVGTNSVGFAAVEEDDSGSPTRFLNTMVVIHDSGVDSEQKKYAITRLASAGTARRTRRLYRTRRQRLRELDDFISNELGYPLVNLENFADPYEPWKVRADLATTKLPNDELPEAMSIALRHMARHRGWRSPYQRVEALHLHAEISKEFAALKERVVEKTGDVFSDDATPAEVLVDLMGRQKVRGADGVLSGKLRQSDNANELRKIASVQGIDDETLNRIIDRVFSSKSPKGKASERVGMDALPGQGSKPRALKAMPSFQKFRVVSVICNLRIKDSGGDARPLSMEEKEKLIDYLMSSTTDDHVTWTDVADLLHVKRSQLQGTAKEGFDGERPYTRPPVNSTWSKIKDSKIKSLVALWKTGDVDVQSAIVEALSNASVLEDSRPGADIVVAYLESLDDKELESLDKVGLPAGRASYSEDSLERLTERMLRDDCDLFEARKREFNVADDWKPPADPIYAPVGNPGVDRVLKIVNRLLMAAEREWGAPTQINIEHVRSGFSSELMQREFERENERRRAQNEEAVKAILTEKGGNSRVSKYDITRYYAVKRQHCQCLYCGTPITFSDCELDHIVPRKGVGSTNTRVNLAAACRSCNRDKSNLPFAVWAGKASNFDVSIDDAVSRVKQWQRSQNEGVREFRAFQNEVISRLLKTTEDPEIDSRSLESVAWMARELHHRVEYYFQSKGAQTQVSVYRGAVTAQARKSSGLEDKVKMIGGGGKTRLDRRHHAMDAATIALMTPGISTTLSEKNNLRDAQKFTGQSETWKDYCGRTETARKHFAVWKSNMERLTDLFNDKLENDAIPVVQPLRLRLSNSKAHDDGIGKLDSKKLGSVWSLADIDRAATPQIWTALTRCDDFDPTKGLPENANRVIRAQGVKYESEDNIPVFPSNVAAIAVRDGYAEIGSTIHHARIYRIDDGKKTFYSMIRVFAVDLLKHQAEDLFTVKLPPSAISIRTCEDSLRRALSNGTAEYLGWLVPGDEIIVDTSDKAFHTGQIGDLLRNFPVNSFRLTGFPSNSRLRLKPVLLAGEGLRDDAEDSIKKILLGQGWRPAINVLFSKGKPRIVRRNSLGIERPSSNNGLPFSWEA

SEQ ID NO: 551 - protein, 1233 aa, Mycoplasma canis
MEKKRKVTLGFDLGIASIGWAIVDSETNQVYKLGSRLFDAPDTNLERRTQRGTRRLLRRRKYRNQKFYNLVKRTEVFGLSSREAIENRFRELSIKYPNIIELKTKALSQEVCPDEIAWILHDYLKNRGYFYDEKETKEDFDQQTVESMPSYKLNEFYKKYGYFKGALSQPTESEMKDNKDLKEAFFFDFSNKEWLKEINYFFNVQKNILSETFIEEFKKIFSFTRDISKGPGSDNMPSPYGIFGEFGDNGQGGRYEHIWDKNIGKCSIFTNEQRAPKYLPSALIFNFLNELANIRLYSTDKKNIQPLWKLSSIDKLNILLNLFNLPISEKKKKLTNANINDIVKKESTKSIMLSVEDIDMIKDEWAGKEPNVYGVGLSGLNIEESAKENKFKFQDLKILNVLINLLDNVGIKFEFKDRNDIIKNLELLDNLYLFLIYQKESNNKDSSIDLFIAKNELLNIENLKLKLKEFLLGAGNEFENHNSKTHSLSKKAIDAILPKLLDNNEGWNLEAIKNYDEEIKSQIEDNSSLMAKQDKKYLNDNFLKDAILPPNVKVTFQQAILIFNKIIQKFSKDFEIDKVVIELAREMTQDQENDALKGIAKAQKSKKSLVEERLEANNIDKSVFNDKYEKLIYKIFLWISQDFKDPYTGAQISTNEIVNNKVEIDHIIPYSLCFDDSSANKVLVHKQSNQEKSNSLPYEYIKQGHSGWNWDEFTKYVKRVFVNNVDSILSKKERLKKSENLLTTSYDGYDKLGFLARNLNDTRYATILFRDQLNNYAEHHLIDNKKMFKVIAMNGAVTSFIRKNMSYDNKLRLKDRSDFSHHAYDAAIIALFSNKTKTLYNLIDPSLNGIISKRSEGYWVIEDRYTGEIKELKKEDWTSIKNNVQARKIAKEIEEYLIDLDDEVFFSRKTKRKTNRQLYNETIYGIAAKTDEDGITNYYKKEKFSILDDKDIYLRLLREREKFVINQSNPEVIDQIIEIIESYGKENNIPSRDEAINIKYTKNKINYNLYLKQYMRSLTKSLDQFSEEFINQMIANKTFVLYNPTKNTTRKIKFLRLVNDVKINDIRKNQVINKFNGKNNEPKAFYENINSLGAIVFKNSANNFKTLSINTQIAIFGDKNWDIEDFKTYNMEKIEKYKEIYGIDKTYNFHSFIFPGTILLDKQNKEFYYISSIQTVRDIIEIKFLNKIEFKDENKNPDTSKTPKRLMFGIKSIMNNYEQVDISPFGINKKIFE

SEQ ID NO: 552 - protein, 1233 aa, Mycoplasma canis
MEKKRKVTLGFDLGIASVGWAIVDSETNQVYKLGSRLFDAPDTNLERRTQRGTRRLLRRRKYRNQKFYNLVKRTEVFGLSSREAIENRFRELSIKYPNIIELKTKALSQEVCPDEIAWILHDYLKNRGYFYDEKETKEDFDQQTIESMPSYKLNEFYKKYGYFKGALSQPTESEMKDNKDLKEAFFFDFSNKEWLKEINYFFNVQKNILSETFIEEFKKIFSFTRDISKGPGSDNMPSPYGIFGEFGDNGQGGRYEHIWDKNIGKCSIFTNEQRAPKYLPSALIFNFLNELANIRLYSTDKKNIQPLWKLSSIDKLNILLNLFNLPISEKKKKLTSANINDIVKKESTKSIMLSVEDIDMIKDEWAGKEPNVYGVGLSGLNIEESAKENKFKFQDLKILNVLINLLDNVGIKFEFKDRNDIIKNLELLDNLYLFLIYQKESNNKDSSIDLFIAKNESLNIENLKLKLKEFLLGAGNEFENHNSKTHSLSKKAIDAILPKLLDNNEGWNLEAIKNYDEEIKSQIEDNSFLMAKQDKKYLNDNFLKDAILPPNVKVTFQQAILIFNKIIQKFSKDFEIDKVVIELAREMTQDQENDALKGIAKAQKSKKSLVEERLEANNIDKSVFNEKYEKLIYKIFLWISQDFKDPYTGAKISANEIVDNKVEIDHIIPYSLCFDDSSANKVLVHKQSNQEKSNSLPYEYIKQGHSGWNWDEFTKYVKRVFVNNVDSILSKKERLKKSENLLTTSYDGYDKLGFLARNLNDTRYATILFRDQLNNYAEHHLIDDKKMFKVIAMNGAVTSFIRKNMSYDNKLRLKNRNDFSHHAYDAAIIALFSNKTKTLYNLIDPSLNGIISKRSEGYWVIEDRYTGEIKELKKEDWTSIKNNVQARKIAKEIEEYLIDLDDEVFFSRKTKRKTNRQLYNETIYGIAAKTDEDGITNYYKKEKLSILDDKDIYLRLLREREKFVINQSNPEVIDQIIEIIESYGKENNIPSRDEAINIKYTKNKINYNLYLKQYMRSLTKSLDQFSEEFINQMIANKTFVLYNPTKNTTRKIKFLRLVNDVKINDIRKNQVINKFNGKNNEPKAFYENINSLGAIVFKNSANNFKTLSINTQIAIFGDKNWDIEDFKTYNMEKIEKYKEIYGIDKTYNFHSFIFPGTILLDKQNKEFYYISSIQTVRDIIEIKFLNKIEFKDENKNQDTSKTPKRLMFGIKSIMNNYEQVDISPFGINKKIFE

SEQ ID NO: 553 - protein, 1233 aa, Mycoplasma canis; identical to SEQ ID NO: 256

SEQ ID NO: 554 - protein, 1233 aa, Mycoplasma canis
MEKKRKVTLGFDLGIASVGWAIVDSETNQVYKLGSRLFDAPDTNLERRTQRGTRRLLRRRKYRNQKFYNLVKRTEVFGLSSREAIENRFRELSIKYPNIIELKTKALSQEVCPDEIAWILHDYLKNRGYFYDEKETKEDFDQQTVESMPSYKLNEFYKKYGYFKGALSQPTESEMKDNKDLKEAFFFDFSNKEWLKEINYFFNVQKNILSETFIEEFKKIFSFTRDISKGPGSDNMPSPYGIFGEFGDNGQGGRYEHIWDKNIGKCSIFTNEQRAPKYLPSALIFNFLNELANIRLYSTDKKNIQPLWKLSSVDKLNILLNLFNLPISEKKKKLTSTNINDIVKKESIKSIMISVEDIDMIKDEWAGKEPNVYGVGLSGLNIEENAKENKFKFQDLKILNVLINLLDNVGIKFEFKDRNDIIKNLELLDNLYLFLIYQKESNNKDSSIDLFIAKNKSLNIENLKLKLKEFLLGAGNEFENHNSKSHSLSKKAIDAILPKLLDNNEGWNLEAIKNYDEEIKSQIEDNSSLMAKQDKKYLNDNFLKDAILPPNVKVTFQQAILIFNKIIQKFSKDFEIDKVVIELAREMTQDQENDALKGMAKAQKSKKSLVEERLEANNIDKSVFNDKYEKLIYKIFLWISQDFKDPYTGAQISVNEIVNNKVEIDHIIPYSLCFDDSSANKVLVHKQSNQEKSNSLPYEYIKQGHSGWNWDEFTKYVKRVFVNNVDSILSKKERLKKSENLLTTSYDGYDKLGFLARNLNDTRYATILFRDQLNNYAEHHLIDNKKMFKVIAMNGAVTSFIRKNMSYDNKLRLKDRSDFSHHAYDAAIIALFSNKTKTLYNLIDPSLNGIISKRSEGYWVIEDRYTGEIKELKKEDWTSIKNNVQARKIAKEIEEYLIDLDDEVFFSRKTKRKTNRQLYNETIYGIAAKTDEDGITNYYKKEKFSILDDKDIYLRLLREREKFVINQSNPEVIDQIIEIIESYGKENNIPSRDEAINIKYTKNKINYNLYLKQYMRSLTKSLDKFSEEFINQMIANKTFVLYNPTKNTTRKIKFLRLVNDVKINDIRKNQVINKFNGKNNEPKAFYENINSLGAIVFKNSANNFKTLSINTQIAIFGDKNWDIEDFKTYNMEKIEKYKEIYGIDKTYNFHSFIFPGTILLDKQNKEFYYISSIQTVRDIIEIKFLNKIEFKDENKNQDTSKTPKRLMFGIKSIMNNYEQVDISPFGINKKIFE

SEQ ID NO: 555 - protein, 1233 aa, Mycoplasma canis
MEKKRKVTLGFDLGIASVGWAIVDSETNQVYKLGSRLFDAPDTNLERRTQRGTRRLLRRRKYRNQKFYNLVKRTEVFGLSSREAIENRFRELSIKYPNIIELKTKALSQEVCPDEIAWILHDYLKNRGYFYDEKETKEDFDQQTVESMPSYKLNEFYKKYGYFKGALSQPTESEMKDNKDLKEAFFFDFSNKEWLKEINYFFNVQKNILSETFIEEFKKIFSFTRDISKGPGSDNMPSPYGIFGEFGDNGQGGRYEHIWDKNIGKCSIFTNEQRAPKYLPSALIFNFLNELANIRLYSTDKKNIQPLWKLSSVDKLNILLNLFNLPISEKKKKLTSTNINDIVKKESIKSIMLSVEDIDMIKYEWAGKEPNVYGVGLSGLNIEESAKENKFKFQDLKILNVLINLLDNVGIKFEFKDRNDIIKNLELLDNLYLFLIYQKESNNKDSSIDLFIAKNKSLNIENLKLKLKEFLLGAGNEFENHNSKTHSLSKKAIDAILPKLLDNNEGWNLEAIKNYDEEIKSQIEDNSSLMAKQDKKYLNDNFLKDAILPPNVKVTFQQAILIFNKIIQKFSKDFEIDKVVIELAREMTQDQENDALKGIAKAQKSKKSLVEERLEANNIDKSVFDDKYEKLIYKIFLWISQDFKDPYTGAKISANEIVNNKVEIDHIIPYSLCFDDSSANKVLVHKQSNQEKSNSLPYEYIKQGHSGWNWDEFTKYVKRVFVNNVDSILSKKERLKKSENLLTTSYDGYDKLGFLARNLNDTRYATILFRDQLNNYAEHHLIDNKKMFKVIAMNGAVTSFIRKNMSYDNKLRLKDRSDFSHHAYDAAIIALFSNKTKTLYNLIDPSLNGIISKRSEGYWVIEDRYTGEIKELKKEDWTSIKNNVQARKIAKEIEEYLIDLDDEVFFSRKTKRKTNRQLYNETIYGIAAKTDEDGITNYYKKEKFSILDDKDIYLRLLREREKFVINQSNPEVIDQIIEIIESYGKENNIPSRDEAINIKYTKNKINYNLYLKQYMRSLTKSLDQFSEEFINQMIANKTFVLYNPTKNTTRKIKFLRLVNDVKINDIRKNQVINKFNGKNNEPKAFYENINSLGAIVFKNSANNFKTLSINTQIAIFGDKNWDIEDFKTYNMEKIEKYKEIYGIDKTYNFHSFIFPGTILLDKQNKEFYYISSIQTVRDIIEIKFLNKIEFKDENKNQDTSKTPKRLMFGIKSIMNNYEQVDISPFGINKKIFE

SEQ ID NO: 556 - protein, 1239 aa, Mycoplasma cynos
MEEKRKVTLGFDLGVASVGWAIVDSETNEVYKLGSRLFDIPDTNIDRRAKRGSRRLVRRRSYRNQKFYNLIKRTKTFGFLDKEAIEKEFVLLSIKYPNIIELKVKGLQEEVSKSEAVWILHDYLKNRGYFYDDKEEKDDLENPSIESMPSYKLYEFYKEYGYFKGALSSPTESEKNKDSDLEKAIFFNFSNKEWTKEINHFFKIQKNIFSEDFKAKFMEFFSFIRDISKGPGSENMPSQYSIFGKYGDDGMGGKYQHIWDKNIGKCSIFKDKVRAPKYLPSALFFNLLNELSNIRLYSVDKREKSVLWRLSSKDKINIILNILQIILFKNDGKISNLDINKIVKNESIKSIILNEIDLDLIKDMWFEKEPNVYGIGLSGLNIEENKKENRFKFQDLKIFSVFIDLLKKSNINIEFNNEKDIIHNLKLLDELYFFLITQKYSRDKYGSIKKFILNNKSFNIDNLDEKLNIFLSISDDEFDNHNSKTHSLSKEAIYFIFPKLLHNNEGWNLEAIKNYDIDVREEISKHSFGIKKQDKKYLDDAFLDDAILPPSVKVTIKQSILIFNKIIKKFSNKFQIDNVVIELAREMTQEKEMDAQKSLNRLKKSRKKIIEERLNANNIDSKMFRDKTGEISPNYIYKIYLWISQNFKDPYTGENISANDILKNNVEIDHIIPYSLCFDDSSSNKVLVFKHSNQSKGNFLPFDMISTFSENSVWNWKEYTQYVEKTFKTNLESILDKKERVKKADNLLTSSYDGYDKLGFLARNLNDTRYATILFRDQLINYSENHLIDSKKMFKVIAMNGGVTSFIRKNMSFDSGLKVKDRSIFSHHAYDAAIIALFSNKTKILYNLINPSLDGIISKRSEGYWVLEDRLTGEIRKLNYNDWQSIKNNVEVKKIAREIESHLSNLDNVVMFSRKSKRKTNKELYNETLYGIATRIDENGIKNYYKKEKFNILEDENIYLRLLNERENFIINRSNPEVIDAIIEIFETIDKNKIPARDVAKNIKYTDNKIKYNLYLKDYMRKLVDEFPDKFRKDFIEQMIAKKIFILFNPIKNTTRKIKSLRSINNNKIEDIRKKQVLEKFNTAKNEPRSFYESLNSLGAIIFKNNLNIYKKMSISSQIATFGDKNWKIDDINTYNKEKLNKYKEIYGIDETYDFYSFIFPGTILLDEKNKEFLYISSIQTLKDKIELKFLDRIEFEKKNVNSNLKPKIKREIISTKKLMSDYKIIKISPLGINKKIFE

SEQ ID NO: 557 - protein, 1269 aa, Mycoplasma gallisepticum
MNNSIKSKPEVTIGLDLGVGSVGWAIVDNETNIIHHLGSRLFSQAKTAEDRRSFRGARRLIRRRKYKLKRFINLIWKYNSYFGFKNKEDILNNYQEQQKLHNTVLNLKLEALNAKIDPKALSWILHDYLKNRGHFYEDNRDFNVYPTEELANYFGEYGYYKGIIDSKEDNDDKLEEGLTKYKFSNQHWLEEIKKVLSNQTGLPEKFKEEYESLFSYVRNYSEGPGSINSVSPYGIYHLDEKEGKVVQKYNNIWDKTIGKCSIFPDEYRAPKNSPIAMIFNEINELSTIRSYSIYLTGWFINQEFKKAYLNKLLDLLIKTNSEKPIDARQFKKLREETIAESIGKETLKDVEREEKLEKEDHKWKLKGLKLNTNGKIQYNDLSSLAKFVHKLKQHLKLDFLLEDQYTTLDKINFLQSLFVYLGKHLRYSNRVDSANLKEFSDSNKLFERVLQEQKDDLFKLFEQTDKDDEKILAQTHSLSTKAMLLAITRMTNLDNDEDNQKNNDKGWNFEAIKNFDQKFIDITKKNNNLSLKQDKRYLDDRFINDAILSPGVKRILREATKVFNAILKQFSEEYDVTKVVIELARELSEEKELENTKNYEKLIKKNSDKISERLEALDIAEDKIEDILKSPTKSYKVLLWLQQDHIDPYSQKEIAFEDILTKTEKTEIDHIIPYSISFDDSSSNKLLVLAESNQAKSNQTPYEFITSGNAGIKWEDYEAYCRKFKDGDTSLLDSTQRSKKFAKMMKTDTSSKYDIGFLARNLNDTRYATIVFRDALKDYANNHLVEDKPMFKVVCINGGVTSFLRKNFDKSWYAKKDRDKNIHHAVDASIISIFSNETKTLFNQLTQFADYKLFKNTDGSWKKIDPKTGVVTEVTDENWKQIRVRNQVSEIAKVINKCIQDSNIERKARYSRKIENKTNISLFNDTVYSAKKVGYEDQIKRKNLKTLDIHESAEENKNSKVKKQFVYRKLVNVSLLNNDKLADLFAEKEDILMYRANPWVINLAEQIFNEYTENKKIKSQNVFEKYMLDLTKEFPEKFSEAFVKSMLRNKTAIIYNVEKKVVHRIKRLKILSSELKENKLSNVIIRSKNESGTKLSYQDTINSIALMIMRSIDPTAKKQYIRVPLNTLNLHLGDQDFDLHNIDAYLKKPKFVKYLKANEIGDEYKPWRVLTSGTLLIHKKDKKLMYISSFQNLKDVIEIKNLIETEYKENDDSDPKKKKKANRFLMTLSTILNDYILLDAKDNFDILGLSKNRIDEILNSKLGLDKITK

SEQ ID NO: 558 - protein, 1224 aa, Mycoplasma gallisepticum
MNNSIKSKPEVTIGLDLGVGSVGWAIVDNETNIIHHLGSRLFSQAKTAEDRRSFRGARRLIRRRKYKLKRFINLIWKYNSYFGFKNKEDILNNYQEQQKLHNTVLNLKLEALNAKIDPKALSWILHDYLKNRGHFYEDNRDFNVYPTEELANYFGEYGYYKGIIDSKEDNDDKLEEGLTKYKFSNQHWLEEIKKVLSNQTGLPEKFKEEYESLFSYVRNYSEGPGSINSVSPYGIYHLDEKEGKVVQKYNNIWDKTIGKCSIFPDEYRAPKNSPIAMIFNEINELSTIRSYSIYLTGWFINQEFKKAYLNKLLDLLIKTNSEKPIDARQFKKLREETIAESIGKETLKDVEREEKLEKEDHKWKLKGLKLNTNGKIQYNDLSSLAKFVHKLKQHLKLDFLLEDQYTTLDKINFLQSLFVYLGKHLRYSNRVDSANLKEFSDSNKLFERVLQEQKDDLFKLFEQTDKDDEKILAQTHSLSTKAMLLAITRMTNLDNDEDNQKNNDKGWNFEAIKNFDQKFIDITKKNNNLSLKQDKRYLDDRFINDAILSPGVKRILREATKVFNAILKQFSEEYDVTKVVIELARELSEEKELENTKNYEKLIKKNSDKISERLEALDIAEDKIEDILKSPTKSYKVLLWLQQDHIDPYSQKEIAFEDILTKTEKTEIDHIIPYSISFDDSSSNKLLVLAESNQAKSNQTPYEFITSGNAGIKWEDYEAYCRKFKDGDTSLLDSTQRSKKFAKMMKTDTSSKYDIGFLARNLNDTRYATIVFRDALKDYANNHLVEDKPMFKVVCINGGVTSFLRKNFDKSWYAKKDRDKNIHHAVDASIISIFSNETKTLFNQLTQFADYKLFKNTDGSWKKIDPKTGVVTEVTDENWKQIRVRNQVSEIAKVINKCIQDSNIERKARYSRKIENKTNISLFNDTVYSAKKVGYEDQIKRKNLKTLDIHESAEENKNSKVKKQFVYRKLVNVSLLNNDKLADLFAEKEDILMYRANPWVINLAEQIFNEYTENKKIKSQNVFEKYMLDLTKEFPEKFSEAFVKSMLRNKTAIIYNVEKKVVHRIKRLKILSSELKENKLSNVIIRSKNESGTKLSYQDTINSIALMIMRSIDPTAKKQYIRVPLNTLNLHLGDQDFDLHNIDAYLKKPKFVKYLKANEIGDEYKPWRVLTSGTLLIHKKDKKLMYISSFQNLKDVIEIKNLIETEYKENDDSDPKKRRKQIGS

SEQ ID NO: 559 - protein, 1269 aa, Mycoplasma gallisepticum; identical to SEQ ID NO: 147

SEQ ID NO: 560 - protein, 226 aa, Mycoplasma iowae
MSNKKKITIGLDIGVSSVGWSILREDNVLIDYGSRLFPDAANAKDGKLENEARRSHRSMRRRIRRIKTRKNDLIKLLIKYNIISDQDELAKILEQGIVNETGNVPIVEIKYKGLKEKLSKEELLICLYHYIHKRGYFYITEEDLKENGENINRLPTEIQYDFYMKNGYYIGNEDNQKFSNLIWVKEIEKFLSKQSLDSNFVDEYISLFRRVRDYSDGPGSEKSPTP

SEQ ID NO: 561 - protein, 1304 aa, Mycoplasma synoviae
MLNNVQNLWKYLLLLIFDKKIIFLFKIKVILIRRYMENNNKEKIVIGFDLGVASVGWSIVNAETKEVIDLGVRLFSEPEKADYRRAKRTTRRLLRRKKFKREKFHKLILKNAEIFGLQSRNEILNVYKDQSSKYRNILKLKINALKEEIKPSELVWILRDYLQNRGYFYKNEKLTDEFVSNSFPSKKLHEHYEKYGFFRGSVKLDNKLDNKKDKAKEKDEEEESDAKKESEELIFSNKQWINEIVKVFENQSYLTESFKEEYLKLFNYVRPFNKGPGSKNSRTAYGVFSTDIDPETNKFKDYSNIWDKTIGKCSLFEEEIRAPKNLPSALIFNLQNEICTIKNEFTEFKNWWLNAEQKSEILKFVFTELFNWKDKKYSDKKFNKNLQDKIKKYLLNFALENFNLNEEILKNRDLENDTVLGLKGVKYYEKSNATADAALEFSSLKPLYVFIKFLKEKKLDLNYLLGLENTEILYFLDSIYLAISYSSDLKERNEWFKKLLKELYPKIKNNNLEIIENVEDIFEITDQEKFESFSKTHSLSREAFNHIIPLLLSNNEGKNYESLKHSNEELKKRTEKAELKAQQNQKYLKDNFLKEALVPLSVKTSVLQAIKIFNQIIKNFGKKYEISQVVIEMARELTKPNLEKLLNNATNSNIKILKEKLDQTEKFDDFTKKKFIDKIENSVVFRNKLFLWFEQDRKDPYTQLDIKINEIEDETEIDHVIPYSKSADDSWFNKLLVKKSTNQLKKNKTVWEYYQNESDPEAKWNKFVAWAKRIYLVQKSDKESKDNSEKNSIFKNKKPNLKFKNITKKLFDPYKDLGFLARNLNDTRYATKVFRDQLNNYSKHHSKDDENKLFKVVCMNGSITSFLRKSMWRKNEEQVYRFNFWKKDRDQFFHHAVDASIIAIFSLLTKTLYNKLRVYESYDVQRREDGVYLINKETGEVKKADKDYWKDQHNFLKIRENAIEIKNVLNNVDFQNQVRYSRKANTKLNTQLFNETLYGVKEFENNFYKLEKVNLFSRKDLRKFILEDLNEESEKNKKNENGSRKRILTEKYIVDEILQILENEEFKDSKSDINALNKYMDSLPSKFSEFFSQDFINKCKKENSLILTFDAIKHNDPKKVIKIKNLKFFREDATLKNKQAVHKDSKNQIKSFYESYKCVGFIWLKNKNDLEESIFVPINSRVIHFGDKDKDIFDFDSYNKEKLLNEINLKRPENKKFNSINEIEFVKFVKPGALLLNFENQQIYYISTLESSSLRAKIKLLNKMDKGKAVSMKKITNPDEYKIIEHVNPLGINLNWTKKLENNN

SEQ ID NO: 562 - protein, 1401 aa, Myroides injenensis
MKRILGLDLGTTSIGWAYVHEAENVNETSSIQKVGVRVNPLTTEEQTNFEKGKPITTNASRTLARSARRNLQRYKLRRDNLIQILKENNWINNTTSLTETGNHSTFETYELRNKAASEKLTLDQLSRVLLMLNKKRGYKSSRKVNSKEEGQLIDGMEVAKKLYHEQLTPGQLSLQLMNQGVKKLPDYYRSDLNQELESIWNFQQQFYPNILTDKFKEEINGKGLTSTSSAFWNIYNFNTAENKGSRDEKKKQALQWRSEALSKQLSKEIVAYIIADLNGQIYNSSGYLGAISDRSKELYFNNLTVGQYLFKQLKSNPHTSLKNQVFYRQDYLNEFEKIWETQSKFYPKELTAALKREIRDVIIFYQRKLKSQKGLISFCEFEQKQKTINGKTKTIGHRVIPKSSPLFQEFKIWQQLHNVVLRNKKTNEIVSLADEQKVHLFEELNLKGKLKSNQVLKLIENKPKDWELNYTELEGNNTNKALYNAYLDILDIEGYDVRNELKVKLNKDDIELSDLDVNASEIKEMIFSVFKHLGINTEILEFDATLEDKVFEKQASYQLWHLLYSYEEDNSPTGLDRLYNLLHKKFGFKLNHAKLIGNVLFQDDYGSLSSKAIKNIFPYITENNYYTACELAGYKHSKHSLTKEENETRELKNRLTILPKNSLRNPVVEKIINQMINVVNTLIDEENNILIAQGKEPNFQFDEIRIELARELKKNAKEREELTKSINKSKTDHEKIIKILQKEDGIKNPTRNDIVRFKLYSELKNNGYKDLYTNEYIERKDIFTKEYDIEHIIPQSKLFDDSFSNKTLVRRNVNLKKGNQTAYDFILCEYGQEKANEFETRITNLYNLGKDEGISKSKFKKLLMQESEIGNGFIERDLRETQYIAKKAKSLLLEITRNVISTSGSITDRLREDWGLINVMKELNLQKYRDAGLTEFVKMKDGNKKEVIIDWTKRNDHRHHAMDALTIAFTKHNHIQYLNHLNARKNVNNELHNNIIAIEKLETTLVSDERGNKKRIFKEPIANFRTIAKSHLEAILVSHKAKNKVVTKNINKISGKKISQQTLTPRGQLHKETIYGKIRQYVSKQEKVGPKFTIEVIEQVSNPTYRNLLLKRLEENNNDPKKAFGGKNSLNKNPIYINLEKNIKVPEVLKLVWLEDNYTIRKEISPDLKIDKVIDQGVKQILQNRLAQYKGDSKLAFSNLDANPIWLNEDKGIAIKRVTISGIATAQPLHRKKDHLGQPILDHNGQEIPVDFISTGNNHHVAIYEDENGKLQESVVSHFEAVERVNQKLPIIDKTFNQHLGWKFLFTMKQNELFLFPSDDFNPNEIDLFDKQNYTVISKHLFRIQKLSTKDYSFRHHLETNVEEIKDLKTITWRREGLNGIQNIIKVRTNHLGEIIHIGEY

SEQ ID NO: 563 - protein, 1466 aa, Myroides odoratus
MKNILGLDLGTNSIGWALVKEDFENKQGEILGLGSRIIPMSQDILGEFGRGNSISQTADRTGYRGVRRLRERHLLRRERLHRVLNILGFLPNHYAKEIDFTKRLGKFINHAEPKLSFDKEFIFKDSFNEMLKDFQQNQPGFIINKHGEEALVPYDWTIYYLRKKALTQKIDKEELAWILLNFNQKRGYYQLRGEEEEENTNKLVEFYSLKIIDVIADNEVNKKGEVWYSLHLENGWIYRRSSKISLVDWKDKVRDFIVTTDVNDDGSEKLDKDGVVKRSFRAPSADDWTLLKKKTEQDIDNSNKTVGAYIYENLLLNPKQKIKGKLVRTIERKFYKDELKQILEKQKEFHQELQNEQLLQDCVRELYKYNEQHQQMLESKDFVHLFLNDIIFYQRPLRSQKSLISNCTLEKRVSRDGVVFPIKVISKSNPYYQEFRLLQWLQNLAIYRKDDDVNVTQEFLNSIESWENLLQFLNAKKEIKQEQLIKFLLEQKGLKGNSLKTAILTYRWNYVTDKVYPMNETRSLIQDKLKKVENVATDFLSFDNEMALWHIIYSVNDKIEYEKALAKFASKHNLDEISFVESFKKFPPFKSDYGSFSEKAIKKLLPLMRFGSVWNKNNIVPSVLDRIDKILTGEYDEKIKIRVREKAEQFQLNQIEDFQNLPLWLAQYVVYDRHSEAEIAGKWNSVKDLENYLKEFKQHSLRNPIVEQIITETLRVVKDIWQQYGNGVQNFFDEIHIELGREMKNTADERKRITNSVTENENTNLRIKALLVELKEDTNIENVRPHSPMQQEILKIYEEGVLNAVENIDEDILKISKTAQPSKSELIRYKLWLEQKYQSPYTGEMIPLSRLFTSDYEIEHVIPQSRYFDDSLSNKVICEAAVNKRKDNQLGLEFIKNHHSEKIELGNGRTAQVLEVEAYESFVKKNYDKNRGKRNKLLLEDVPEKMIERQLNDTRYISKFVTHLLSNIVRKDEVNSKDDGINSKNIIPGNGKITSQLKQDWGLNDVWNELILPRFERMNNLTNSTDFTSTNTNGKIIPTVPLEYSKGFSKKRIDHRHHALDALVIALATRDHVNLLNNESALPKKDRTKEEQKSFRFDLQVNLRNKEKYFNVKEGREKEKFTTFKKPWNTLTQDTRDALENMVVSFKQNLRVINKATNYYESYTDENGNLRLDKYGNPKKELISQKGTNWAIRKSLHKETVSGQIHLDRVKVTKGKIVTATRKSLDSSFNEKSIESITDTGIQKILRNYLKAKDNKPDVAFSPEGIEELNKSISVYNEGKNHQPIIKVRIFEQGSKFPVGETGNKIAKFVEAAKGTNLFFGIYQDKTGKRSYDTIPLNLVIERLKQGLSPVPETNEKGHQLLFHLSPNDLVYVPTIDDNEQLDSNRVYKFTDSSDTTCNFIPSNISAIIFNINSKEQEKRGINYPIQNELGVGSPQSKNQKSFDGFMIKEVCIKLKVDRLGNISKT

SEQ ID NO: 564 - protein, 241 aa, Neisseria lactamica
MAAFKPNPMNYILGLDIGIASVGWAMVEIDKEENPIRLIDLGVRVFERAEMPKTGDSLAMARRLARSVRRLTRRRAHRLLRARRLLKREGVLQDADFDENGLVKSLPNTPWQLRAAALDRKLTCLEWSAVLLHLIKHRGYLSQRKNEGETADKELGALLKGVADNAHALQTGDFRTPAELALNKFEKESGHIRNQRGDYSHTFSRKDLQAELNLLFEKQKEFGNPHVSDGLKEGIETLLMA

SEQ ID NO: 565 - protein, 666 aa, Neisseria lactamica
MAAFKPNPMNYILGLDIGIASVGWAMVEVDEEENPIRLIDLGVRVFERAEVPKTGDSLAMARRLARSVRRLTRRRAHRLLRARRLLKREGVLQDADFDENGLVKSLPNTPWQLRAAALDRKLTCLEWSAVLLHLVKHRGYLSQRKNEGETADKELGALLKGVADNAHALQTGDFRTPAELALNKFEKESGHIRNQRGDYSHTFSRKDLQAELNLLFEKQKEFGNPHVSDGLKEDIETLLMAQRPALSGDAVQKMLGHCTFEPAEPKAAKNTYTAERFIWLTKLNNLRILEQGSERPLTDTERATLMDEPYRKSKLTYAQARKLLGLEDTAFFKGLRYGKDNAEASTLMEMKAYHAISRALEKEGLKDKKSPLNLSTELQDEIGTAFSLFKTDKDITGRLKDRVQPEILEALLKHISFDKFVQISLKALRRIVPLMEQGKRYDEACAEIYGDHYCKKNAEEKIYLPPIPADEIRNPVVLRALSQARKVINCVVRRYGSPARIHIETAREVGKSFKDRKEIEKRQEENRKDREKAAAKFREYFPNFVGEPKSKDILKLRLYEQQHGKCLYSGKEINLVRLNEKGYVEIDHALPFSRTWDDSFNNKVLVLGSENQNKGNQTPYEYFNGKDNSREWQEFKARVETSRFPRSKNNGFCCKNSMKKDLKNAT

SEQ ID NO: 566 - protein, 828 aa, Neisseria lactamica
MLGHCTFEPAEPKAAKNTYTAERFIWLTKLNNLRILEQGSERPLTDTERATLMDEPYRKSKLTYAQARKLLGLEDTAFFKGLRYGKDNAEASTLMEMKAYHAISRALEKEGLKDKKSPLNLSTELQDEIGTAFSLFKTDKDITGRLKDRVQPEILEALLKHISFDKFVQISLKALRRIVPLMEQGKRYDEACAEIYGDHYGKKNTEEKIYLPPIPADEIRNPVVLRALSQARKVINAVVRRYDSPARIHIETAREVGKSFKDRKEIEKRQEENRKDREKAAAKFREYFPNFVGEPKSKDILKLRLYEQQHGKCLYSGKEINLVRLNEKGYVEIDHALPFSRTWDDSFNNKVLVLGSENQNKGNQTPYEYFNGKDNSREWQEFKARVETSRFPRSKKQRILLQKFDEEGFKERNLNDTRYVNRFLCQFVADHILLTGKGKRRVFASNGQITNLLRGFWGLRKVRAENDRHHALDAVVVACSTVAMQQKITRFVRYKEMNAFDGKTIDKETGEVLHQKAHFPQPWEFFAQEVMIRVFGKPDGKPEFEEADTSEKLRTLLAEKLSSRPEAVHEYVTPLFVSRAPNRKMSGQGHMETVKSAKRLDEGISVLRVPLTQLKLKDLEKMVNREREPKLYDALKAQLETHKDDPAKAFAEPFYKYDKAGSRTQQVKAVRIEQVQKTGVWVRNHNGIADNATMVRVDVFEKGGKYYLVPIYSWQVAKGILPDRAVVAFKDEEDWTVMDDSFEFRFVLYANDLIKAELKKETFFGYFSGLDRSTGNISLRSHDLDKTKGKDGVYRIGIKTALSFQKHQIDELGKEIRPCRLKKRPPVR

SEQ ID NO: 567 - protein, 408 aa, Neisseria lactamica
MNDTRYVNRFLCQFVADHILLTGKGKRRVFASNGQITNLLRGFWGLRKVRTENDRHHALDAVVVACSTVAMQQKITRFVRYKEMNAFDGKTIDKETGEVLHQKAHFPQPWEFFAQEVMIRVFGKPDGKPEFEEADTPEKLRTLLAEKLSSRPEAVHEYVTPLFVSRAPNRKMSGQGHMETVKSAKRLDEGISVLRVPLTQLKLKGLEKMVNREREPKLYDALKAQLETHKDDPAKAFAEPFYKYDKAGSRTQQVKAVRIEQVQKTGVWVRNHNGIADNATMVRVDVFEKGGKYYLVPIYSWQVAKGILPDRAVVAFKDEEDWTVMDDSFEFRFVLYANDLIKLTAKKNEFLGYFVSLNRATGAIDIRTHDTDSTKGKNGIFQSVGVKTALSFQKTKSTNSAKKSDHAV

SEQ ID NO: 568 - protein, 1082 aa, Neisseria meningitidis
MAAFKPNPINYILGLDIGIASVGWAMVEIDEDENPICLIDLGVRVFERAEVPKTGDSLAAARRLARSVRRLTRRRAHRLLRARRLLKREGVLQAADFDENGLIKSLPNTPWQLRAAALDRKLTPLEWSAVLLHLIKHRGYLSQRKNEGETADKELGALLKGVADNAHALQTGDFRTPAELALNKFEKESGHIRNQRGDYSHTFSRKDLQAELILLFEKQKEFGNPHVSGGLKEGIETLLMTQRPALSGDAVQKMLGHCTFEPAEPKAAKNTYTAERFIWLTKLNNLRILEQGSERPLTDTERATLMDEPYRKSKLTYAQARKLLGLEDTAFFKGLRYGKDNAEASTLMEMKAYHAISRALEKEGLKDKKSPLNLSPELQDEIGTAFSLFKTDEDITGRLKDRVQPEILEALLKHISFDKFVQISLKALRRIVPLMEQGKRYDEACAEIYGDHYGKKNTEEKIYLPPIPADEIRNPVVLRALSQARKVINGVVRRYGSPARIHIETAREVGKSFKDRKEIEKRQEENRKDREKAAAKFREYFPNFVGEPKSKDILKLRLYEQQHGKCLYSGKEINLGRLNEKGYVEIDHALPFSRTWDDSFNNKVLVLGSENQNKGNQTPYEYFNGKDNSREWQEFKARVETSRFPRSKKQRILLQKFDEDGFKERNLNDTRYVNRFLCQFVADRMRLTGKGKKRVFASNGQITNLLRGFWGLRKVRAENDRHHALDAVVVACSTVAMQQKITRFVRYKEMNAFDGKTIDKETGEVLHQKTHFPQPWEFFAQEVMIRVFGKPDGKPEFEEADTPEKLRTLLAEKLSSRPEAVHEYVTPLFVSRAPNRKMSGQGHMETVKSAKRLDEGVSVLRVPLTQLKLKDLEKMVNREREPKLYEALKARLEAHKDDPAKAFAEPFYKYDKAGNRTQQVKAVRVEQVQKTGVWVRNHNGIADNATMVRVDVFEKGDKYYLVPIYSWQVAKGILPDRAVVQGKDEEDWQLIDDSFNFKFSLHPNDLVEVITKKARMFGYFASCHRGTGNINIRIHDLDHKIGKNGILEGIGVKTALSFQKYQIDELGKEIRPCRLKKRPPVR

SEQ ID NO: 569 - protein, 976 aa, Neisseria meningitidis
MAAFKPNPINYILGLDIGIASVGWAMVEIDEDENPICLIDLGVRVFERAEVPKTGDSLAAARRLARSVRRLTRRRAHRLLRARRLLKREGVLQAADFDENGLIKSLPNTPWQLRAAALDRKLTPLEWSAVLLHLIKHRGYLSQRKNEGETADKELGALLKGVADNAHALQTGDFRTPAELALNKFEKESGHIRNQRGDYSHTFSRKDLQAELILLFEKQKEFGNPHVSGGLKEGIETLLMTQRPALSGDAVQKMLGHCTFEPAEPKAAKNTYTAERFIWLTKLNNLRILEQGSERPLTDTERATLMDEPYRKSKLTYAQARKLLGLEDTAFFKGLRYGKDNAEASTLMEMKAYHAISRALEKEGLKDKKSPLNLSPELQDEIGTAFSLFKTDEDITGRLKDRIQPEILEALLKHISFDKFVQISLKALRRIVPLMEQGKRYDEACAEIYGDHYGKKNTEEKIYLPPIPADEIRNPVVLRALSQARKVINGVVRRYGSPARIHIETAREVGKSFKDRKEIEKRQEENRKDREKAAAKFREYFPNFVGEPKSKDILKLRLYEQQHGKCLYSGKEINLGRLNEKGYVEIDHALPFSRTWDDSFNNKVLVLGSENQNKGNQTPYEYFNGKDNSREWQEFKARVETSRFPRSKKQRILLQKFDEDGFKERNLNDTRYVNRFLCQFVADRMRLTGKGKKRVFASNGQITNLLRGFWGLRKVRAENDRHHALDAVVVACSTVAMQQKITRFVRYKEMNAFDGKTIDKETGEVLHQKTHFPQPWEFFAQEVMIRVFGKPDGKPEFEEADTPEKLRTLLAEKLSSRPEAVHEYVTPLFVSRAPNRKMSGQGHMETVKSAKRLDEGVSVLRVPLTQLKLKDLEKMVNREREPKLYEALKARLEAHKDDPAKAFAEPFYKYDKAGNRTQQVKAVRVEQVQKTGVWVRNHNGIADNATMVRVDVFEKGDKYYLVPIYSWQVAKGIFAG

SEQ ID NO: 570 - protein, 1081 aa, Neisseria meningitidis
MAAFKPNPINYILGLDIGIASVGWAMVEIDEDENPICLIDLGVRVFERAEVPKTGDSLAAARRLARSVRRLTRRRAHRLLRARRLLKREGVLQAADFDENGLIKSLPNTPWQLRSAALDRKLTPLEWSAVLLHLIKHRGYLSQRKNEGETADKELGALLKGVADNAHALQTGDFRTPAELALNKFEKESGHIRNRRGDYSHTFSRKDLQAELDLLFEKQKEFGNPHISDDLKEGIETLLMTQRPALSGDAVQKMLGHCTFEPTEPKAAKNTYTAERFVWLTKLNNLRILEQGSERPLTDTERATLMDEPYRKSKLTYAQARKLLELDDTAFFKGLRYGKDNAEASTLMEMKAYHAISRALEKEGLKDKKSPLNLSPELQDEIGTAFSLFKTDEDITGRLKDRVQPEILEVLLKHISFDKFVQISLKALRRIVPLMEQGKRYDEACAEIYGDHDGKKNTEEKIYLPPIPADEIRNPVVLRALSQARKVINAVVRRYGSPARIHIETAREVGKSFKDRKEIEKRQEENRKDREKAAAKFREYFPNFVGEPKSKDILKLRLYEQQHGKCLYSGKEINLGRLNEKGYVEIDHALPFSRTWDDSFNNKVLVLGSENQNKGNQTPYEYFNGKDNSREWQEFKARVETSRFPRSKKQRILLQKFDEEGFKERNLNDTRYVNRFLCQFVADHMLLTGKGKRRVFASNGQITNLLRGFWGLRKVRAENNRHHALDAVVVACSTVAMQQKITRFVRYKEMNAFDGKTIDKETGEVLHQKTHFPQPWEFFAQEVMIRVFGKPDGKPEFEEADTPEKLRTLLAEKLSSRPEAVHEYVTPLFVSRAPNRKMSGQGHMETVKSAKRLDEGVSVLRVPLTQLKLKDLEKMVNREREPKLYEALKARLEAHKDDPAKAFAEPFYKYDKAGNRTQQVKAVRVEQVQKTGVWVRNHNGIADNATMVRVDVFEKAGKYYLVPIYSWQVAKGILPDRAVVAYADEEGWTVIDESFRFKFVLYSNDLIKVQLKKDSFLGYFSGLDRATGAISLREHDLEKSKGKDGMHRIGVKTALSFQKYQIDEMGKEIRLCRLKKRPPVR

SEQ ID NO: 571 - protein, 1081 aa, Neisseria meningitidis
MAAFKPNPINYILGLDIGIASVGWAMVEIDEDENPICLIDLGVRVFERAEVPKTGDSLAAARRLARSVRRLTRRRAHRLLRARRLLKREGVLQAADFDENGLIKSLPNTPWQLRSAALDRKLTPLEWSAVLLHLIKHRGYLSQRKNEGETADKELGALLKGVANNAHALQTGDFRTPAELALNKFEKESGHIRNQRGDYSHTFSRKDLQAELILLFEKQKEFGNPHVSGGLKEGIETLLMTQRPALSGDAVQKMLGHCTFEPAEPKAAKNTYTAERFIWLTKLNNLRILEQGSERPLTDTERATLMDEPYRKSKLTYAQARKLLGLEDTAFFKGLRYGKDNAEASTLMEMKAYHAISRALEKEGLKDKKSPLNLSPELQDEIGTAFSLFKTDEDITGRLKDRIQPEILEALLKHISFDKFVQISLKALRRIVPLMEQGKRYDEACAEIYGDHYGKKNTEEKIYLPPIPADEIRNPVVLRALSQARKVINGVVRRYGSPARIHIETAREVGKSFKDRKEIEKRQEENRKDREKAAAKFREYFPNFVGEPKSKDILKLRLYEQQHGKCLYSGKEINLGRLNEKGYVEIDHALPFSRTWDDSFNNKVLVLGSENQNKGNQTPYEYFNGKDNSREWQEFKARVETSRFPRSKKQRILLQKFDEDGFKERNLNDTRYVNRFLCQFVADRMRLTGKGKKRVFASNGQITNLLRGFWGLRKVRAENDRHHALDAVVVACSTVAMQQKITRFVRYKEMNAFDGKTIDKETGEVLHQKTHFPQPWEFFAQEVMIRVFGKPDGKPEFEEADTPEKLRTLLAEKLSSRPEAVHEYVTPLFVSRAPNRKMSGQGHMETVKSAKRLDEGVSVLRVPLTQLKLKDLEKMVNREREPKLYEALKARLEAHKDDPAKAFAEPFYKYDKAGNRTQQVKAVRVEQVQKTGVWVRNHNGIADNATMVRVDVFEKAGKYYLVPIYSWQVAKGILPDRAVVAYADEEGWTVIDESFRFKFVLYSNDLIKVQLKKDSFLGYFSGLDRATGAISLREHDLEKSKGKDGMHRIGVKTALSFQKYQIDEMGKEIRLCRLKKRPPVR

SEQ ID NO: 572 - protein, 1082 aa, Neisseria meningitidis
MAAFKPNPINYILGLDIGIASVGWAMVEIDEDENPICLIDLGVRVFERAEVPKTGDSLAMARRLARSVRRLTRRRAHRLLRARRLLKREGVLQAADFDENGLIKSLPNTPWQLRAAALDRKLTPLEWSAVLLHLIKHRGYLSQRKNEGETADKELGALLKGVADNAHALQTGDFRTPAELALNKFEKESGHIRNQRGDYSHTFSRKDLQAELILLFEKQKEFGNPHVSGGLKEGIETLLMTQRPALSGDAVQKMLGHCTFEPAEPKAAKNTYTAERFIWLTKLNNLRILEQGSERPLTDTERATLMDEPYRKSKLTYAQARKLLGLEDTAFFKGLRYGKDNAEASTLMEMKAYHAISRALEKEGLKDKKSPLNLSPELQDEIGTAFSLFKTDEDITGRLKDRIQPEILEALLKHISFDKFVQISLKALRRIVPLMEQGKRYDEACAEIYGDHYGKKNTEEKIYLPPIPADEIRNPVVLRALSQARKVINGVVRRYGSPARIHIETAREVGKSFKDRKEIEKRQEENRKDREKAAAKFREYFPNFVGEPKSKDILKLRLYEQQHGKCLYSGKEINLGRLNEKGYVEIDHALPFSRTWDDSFNNKVLVLGSENQNKGNQTPYEYFNGKDNSREWQEFKARVETSRFPRSKKQRILLQKFDEDGFKERNLNDTRYVNRFLCQFVADRMRLTGKGKKRVFASNGQITNLLRGFWGLRKVRAENDRHHALDAVVVACSTVAMQQKITRFVRYKEMNAFDGKTIDKETGEVLHQKTHFPQPWEFFAQEVMIRVFGKPDGKPEFEEADTPEKLRTLLAEKLSSRPEAVHEYVTPLFVSRAPNRKMSGQGHMETVKSAKRLDEGVSVLRVPLTQLKLKDLEKMVNREREPKLYEALKARLEAHKDDPAKAFAEPFYKYDKAGNRTQQVKAVRVEQVQKTGVWVRNHNGIADNATMVRVDVFEKGDKYYLVPIYSWQVAKGILPDRAVVQGKDEEDWQLIDDSFNFKFSLHPNDLVEVITKKARMFGYFASCHRGTGNINIRIHDLDHKIGKNGILEGIGVKTALSFQKYQIDELGEEIRPCRLKKRPPVR

SEQ ID NO: 573 - protein, 1082 aa, Neisseria meningitidis
MAAFKPNPINYILGLDIGIASVGWAMVEIDEDENPICLIDLGVRVFERAEVPKTGDSLAMARRLARSVRRLTRRRAHRLLRARRLLKREGVLQAADFDENGLIKSLPNTPWQLRAAALDRKLTPLEWSAVLLHLIKHRGYLSQRKNEGETADKELGALLKGVADNAHALQTGDFRTPAELALNKFEKESGHIRNQRGDYSHTFSRKDLQAELILLFEKQKEFGNPHVSGGLKEGIETLLMTQRPALSSDAVQKMLGHCTFEPAEPKAAKNTYTAERFIWLTKLNNLRILEQGSERPLTDTERATLMDEPYRKSKLTYAQARKLLGLEDTAFFKGLRYGKDNAEASTLMEMKAYHAISRALEKEGLKDKKSPLNLSPELQDEIGTAFSLFKTDEDITGRLKDRIQPEILEALLKHISFDKFVQISLKALRRIVPLMEQGKRYDEACAEIYGDHYGKKNTEEKIYLPPIPADEIRNPVVLRALSQARKVINGVVRRYGSPARIHIETAREVGKSFKDRKEIEKRQEENRKDREKAAAKFREYFPNFVGEPKSKDILKLRLYEQQHGKCLYSGKEINLGRLNEKGYVEIDHALPFSRTWDDSFNNKVLVLGSENQNKGNQTPYEYFNGKDNSREWQEFKARVETSRFPRSKKQRILLQKFDEDGFKERNLNDTRYVNRFLCQFVADRMRLTGKGKKRVFASNGQITNLLRGFWGLRKVRAENDRHHALDAVVVACSTVAMQQKITRFVRYKEMNAFDGKTIDKETGEVLHQKTHFPQPWEFFAQEVMIRVFGKPDGKPEFEEADTPEKLRTLLAEKLSSRPEAVHEYVTPLFVSRAPNRKMSGQGHMETVKSAKRLDEGVSVLRVPLTQLKLKDLEKMVNREREPKLYEALKARLEAHKDDPAKAFAEPFYKYDKAGNRTQQVKAVRVEQVQKTGVWVRNHNGIADNATMVRVDVFEKGDKYYLVPIYSWQVAKGILPDRAVVQGKDEEDWQLIDDSFNFKFSLHPNDLVEVITKKARMFGYFASCHRGTGNINIRIHDLDHKIGKNGILEGIGVKTALSFQKYQIDELGKEIRPCRLKKRPPVR

SEQ ID NO: 574 - protein, 1082 aa, Neisseria meningitidis
MAAFKPNPINYILGLDIGIASVGWAMVEIDEDENPICLIDLGVRVFERAEVPKTGDSLAMARRLARSVRRLTRRRAHRLLRARRLLKREGVLQAADFDENGLIKSLPNTPWQLRAAALDRKLTPLEWSAVLLHLIKHRGYLSQRKNEGETADKELGALLKGVADNAHALQTGDFRTPAELALNKFEKESGHIRNQRGDYSHTFSRKDLQAELILLFEKQKEFGNPHVSGGLKEGIETLLMTQRPALSSDAVQKMLGHCTFEPAEPKAAKNTYTAERFIWLTKLNNLRILEQGSERPLTDTERATLMDEPYRKSKLTYAQARKLLGLEDTAFFKGLRYGKDNAEASTLMEMKAYHAISRALEKEGLKDKKSPLNLSPELQDEIGTAFSLFKTDEDITGRLKDRIQPEILEALLKHISFDKFVQISLKALRRIVPLMEQGKRYDEACAEIYGDHYGKKNTEEKIYLPPIPADEIRNPVVLRALSQARKVINGVVRRYGSPARIHIETAREVGKSFKDRKEIEKRQEENRKDREKAAAKFREYFPNFVGEPKSKDILKLRLYEQQHGKCLYSGKEINLGRLNEKGYVEIDHALPFSRTWDDSFNNKVLVLGSENQNKGNQTPYEYFNGKDNSREWQEFKARVETSRFPRSKKQRILLQKFDEDGFKERNLNDTRYVNRFLYQFVADRMRLTGKGKKRVFASNGQITNLLRGFWGLRKVRAENDRHHALDAVVVACSTVAMQQKITRFVRYKEMNAFDGKTIDKETGEVLHQKTHFPQPWEFFAQEVMIRVFGKPDGKPEFEEADTPEKLRTLLAEKLSSRPEAVHEYVTPLFVSRAPNRKMSGQGHMETVKSAKRLDEGVSVLRVPLTQLKLKDLEKMVNREREPKLYEALKARLEAHKDDPAKAFAEPFYKYDKAGNRTQQVKAVRVEQVQKTGVWVRNHNGIADNATMVRVDVFEKGDKYYLVPIYSWQVAKGILPDRAVVQGKDEEDWQLIDDSFNFKFSLHPNDLVEVITKKARMFGYFASCHRGTGNINIRIHDLDHKIGKNGILEGIGVKTALSFQKYQIDELGKEIRPCRLKKRPPVR

SEQ ID NO: 575 - protein, 1081 aa, Neisseria meningitidis
MAAFKPNPINYILGLDIGIASVGWAMVEIDEDENPICLIDLGVRVFERAEVPKTGDSLAMARRLARSVRRLTRRRAHRLLRARRLLKREGVLQAADFDENGLIKSLPNTPWQLRAAALDRKLTPLEWSAVLLHLIKHRGYLSQRKNEGETADKELGALLKGVADNAHALQTGDFRTPAKLALNKFEKESGHIRNQRGDYSHTFSRKDLQAELNLLFEKQKEFGNPHISDGLKEGIETLLMTQRPALSGDAVQKMLGHCTFEPTEPKAAKNTYTAERFVWLTKLNNLRILEQGSEQPLTDTQRAKLMDEPYRKSKLTYAQARKLLGLEDTAFFKGLRYGKDNAEASTLMEMKAYHAISRALEKEGLKDKKSPLNLSPELQDEIGTAFSLFKTDEDITGRLKDRVQPEILEALLKHISFDKFVQISLKALRRIVPLMEQGKRYNEACAEIYGDHYGKKNTEEKIYLPPIPADEIRNPVVLRALSQARKVINGVVRRYGSPARIHIETAREVGKSFKDRKEIEKRQEENRKDREKAAAKFQEYFPNFVGEPKSKDILKLRLYEQQHGKCLYSGKEINLGRLNEKGYVEIDHALPFSRTWDDSFNNKVLVLGSENQNKGNQTPYEYFNGKDNSREWQEFKARVETSRFPRSKKQRILLQKFDEDGFKERNLNDTRYVNRFLCQFVADRMRLTGKGKKRVFASNGQITNLLRGFWGLRKVRAENDRHHALDAVVVACSTVAMQQKITRFVRYKEMNAFDGKTIDKETGEVLHQKTHFPQPWEFFAQEVMIRVFGKPDGKPEFEEADTPEKLRTLLAEKLSSRPEAVHEYVTPLFVSRAPNRKMSGQGHMETVKSAKRLDEGVSVLRVPLTQLKLKDLEKMVNREREPKLYEALKARLEAHKDDPAKAFAEPFYKYDKAGNRTQQVKAVRVEQVQKTGVWVRNHNGIADNATMVRVDVFEKGDKYYLVPIYSWQVAKGILPDRAVVAYADEEDWTVIDESFRFKFVLYSNDLIKVQLKKDSFLGYFSGLDRATGAISLREHDLEKSKGKDGMHRIGVKTALSFQKYQIDEMGKEIRPCRLKKRPPVR

SEQ ID NO: 576 - protein, 1081 aa, Neisseria meningitidis
MAAFKPNPINYILGLDIGIASVGWAMVEIDEEENPIRLIDLGVRVFERAEVPKTGDSLAMARRLARSVRRLTRRRAHRLLRARRLLKREGVLQAADFDENGLIKSLPNTPWQLRAAALDRKLTPLEWSAVLLHLIKHRGYLSQRKNEGETADKELGALLKGVADNAHALQTGDFRTPAELALNKFEKECGHIRNQRGDYSHTFSRKDLQAELNLLFEKQKEFGNPHVSGGLKEGIETLLMTQRPALSGDAVQKMLGHCTFEPAEPKAAKNTYTAERFIWLTKLNNLRILEQGSERPLTDTERATLMDEPYRKSKLTYAQARKLLSLEDTAFFKGLRYGKDNAEASTLMEMKAYHTISRALEKEGLKDKKSPLNLSPELQDEIGTAFSLFKTDEDITGRLKDRIQPEILEALLKHISFDKFVQISLKALRRIVPLMEQGKRYDEACAEIYGDHYGKKNTEEKIYLPPIPADEIRNPVVLRALSQARKVINGVVRRYGSPARIHIETAREVGKSFKDRKEIEKRQEENRKDREKAAAKFREYFPNFVGEPKSKDILKLRLYEQQHGKCLYSGKEINLGRLNEKGYVEIDHALPFSRTWDDSFNNKVLVLGSENQNKGNQTPYEYFNGKDNSREWQEFKARVETSRFPRSKKQRILLQKFDEDGFKERNLNDTRYVNRFLCQFVADRMRLTGKGKKRVFASNGQITNLLRGFWGLRKVRAENDRHHALDAVVVACSTVAMQQKITRFVRYKEMNAFDGKTIDKETGEVLHQKTHFPQPWEFFAQEVMIRVFGKPDGKPEFEEADTPEKLRTLLAEKLSSRPEAVHEYVTPLFVSRAPNRKMSGQGHMETVKSAKRLDEGVSVLRVPLTQLKLKDLEKMVNREREPKLYEALKARLEAHKDDPAKAFAEPFYKYDKAGNRTQQVKAVRVEQVQKTGVWVRNHNGIADNATMVRVDVFEKGDKYYLVPIYSWQVAKGILPDRAVVAYADEEDWTVIDESFRFKFVLYSNDLIKVQLKKDSFLGYFSGLDRATGAISLREHDLEKSKGKDGMHRIGVKTALSFQKYQIDEMGKEIRPCRLKKRPPVR

SEQ ID NO: 577 - protein, 1082 aa, Neisseria meningitidis
MAAFKPNPINYILGLDIGIASVGWAMVEIDEEENPIRLIDLGVRVFERAEVPKTGDSLAMARRLARSVRRLTRRRAHRLLRARRLLKREGVLQAADFDENGLIKSLPNTPWQLRAAALDRKLTPLEWSAVLLHLIKHRGYLSQRKNEGETADKELGALLKGVADNAHALQTGDFRTPAELALNKFEKECGHIRNQRGDYSHTFSRKDLQAELNLLFEKQKEFGNPHVSGGLKEGIETLLMTQRPALSGDAVQKMLGHCTFEPAEPKAAKNTYTAERFIWLTKLNNLRILEQGSERPLTDTERATLMDEPYRKSKLTYAQARKLLGLEDTAFFKGLRYGKDNAEASTLMEMKAYHAISRALEKEGLKDKKSPLNLSPELQDEIGTAFSLFKTDEDITGRLKDRIQPEILEALLKHISFDKFVQISLKALRRIVPLMEQGKRYDEACAEIYGDHYGKKNTEEKIYLPPIPADEIRNPVVLRALSQARKVINGVVRRYGSPARIHIETAREVGKSFKDRKEIEKRQEENRKDREKAAAKFREYFPNFVGEPKSKDILKLRLYEQQHGKCLYSGKEINLVRLNEKGYVEIDHALPFSRTWDDSFNNKVLVLGSENQNKGNQTPYEYFNGKDNSREWQEFKARVETSRFPRSKKQRILLQKFDEEGFKERNLNDTRYVNRFLCQFVADHILLTGKGKRRVFASNGQITNLLRGFWGLRKVRAENDRHHALDAVVVACSTVAMQQKITRFVRYKEMNAFDGKTIDKETGEVLHQKTHFPQPWEFFAQEVMIRVFGKPDGKPEFEEADTPEKLRTLLAEKLSSRPEAVHEYVTPLFVSRAPNRKMSGQGHMETVKSAKRLDEGVSVLRVPLTQLKLKDLEKMVNREREPKLYEALKARLEAHKDDPAKAFAEPFYKYDKAGNRTQQVKAVRVEQVQKTGVWVRNHNGIADNATMVRVDVFEKGGKYYLVPIYSWQVAKGILPDRAVVQGKDEEDWQLIDDSFNFKFSLHPNDLVEVITKKARMFGYFASCHRGTGNINIRIHDLDHKIGKNGILEGIGVKTALSFQKYQIDELGKEIRPCRLKKRPPVR

SEQ ID NO: 578 - protein, 1081 aa, Neisseria meningitidis
MAAFKPNPINYILGLDIGIASVGWAMVEIDEEENPIRLIDLGVRVFERAEVPKTGDSLAMARRLARSVRRLTRRRAHRLLRARRLLKREGVLQAADFDENGLIKSLPNTPWQLRAAALDRKLTPLEWSAVLLHLIKHRGYLSQRKNEGETADKELGALLKGVADNAHALQTGDFRTPAELALNKFEKESGHIRNQRGDYSHTFSRKDLQAELILLFEKQKEFGNPHVSGGLKEGIETLLMTQRPALSGDAVQKMLGHCTFEPAEPKAAKNTYTAERFIWLTKLNNLRILEQGSERPLTDTERATLMDEPYRKSKLTYAQARKLLGLEDTAFFKGLRYGKDNAEASTLMEMKAYHAISRALEKEGLKDKKSPLNLSPELQDEIGTAFSLFKTDEDITGRLKDRVQPEILEALLKHISFDKFVQISLKALRRIVPLMEQGKRYDEACAEIYGDHYGKKNTEEEIYLPPITADEIRNPVVLRALSQARKVINAVVRRYGSPARIHIETAREVGKSFKDRKEIEKRQEENRKDREKAAAKFREYFPNFVGEPKSKDILKLRLYEQQHGKCLYSGKEINLVRLNEKGYVEIDHALPFSRTWDDSFNNKVLVLGSENQNKGNQTPYEYFNGKENSREWQEFKARVETSRFPRSKKQRILLQKFDEDGFKERNLNDTRYVNRFLCQFVADRMRLTGKGKKRVFASNGQITNLLRGFWGLHKVRAENDRHHALDAVVVACSTIAMQQKITRFVRYKEMNAFDGKTIDKETGEVLHQKAHFPQPWEFFAQEVMIRVFGKPDGKPEFEEADTPEKLRTLLAEKLSSRPEAVHEYVTPLFVSRAPNRKMSGQGHMETVKSAKRLDEGISVLRVPLTQLKLKDLEKMVNRAREPKLYEALKARLEAHKDDPAKAFAEPFYKYDKAGNRTQQVKAVRVEQVQKTGVWVRNHNGIADNATMVRVDVFEKAGKYYLVPIYSWQVAKGILPDRAVVAYADEEDWTVIDESFRFKFVLYSNDLIKVQLKKDSFLGYFSGLDRATGAISLREHDLEKSKGKDGMHRIGVKTALSFQKYQIDEMGKEIRPCRLKKRPPVR

SEQ ID NO: 579 - protein, 1082 aa, Neisseria meningitidis
MAAFKPNPINYILGLDIGIASVGWAMVEIDEEENPIRLIDLGVRVFERAEVPKTGDSLAMARRLARSVRRLTRRRAHRLLRARRLLKREGVLQAADFDENGLIKSLPNTPWQLRAAALDRKLTPLEWSAVLLHLIKHRGYLSQRKNEGETADKELGALLKGVANNAHALQTGDFRTPAELALNKFEKESGHIRNQRGDYSHTFSRKDLQAELILLFEKQKEFGNPHVSGGLKEGIETLLMTQRPALSGDAVQKMLGHCTFEPAEPKAAKNTYTAERFIWLTKLNNLRILEQGSERPLTDTERATLMDEPYRKSKLTYAQARKLLGLEDTAFFKGLRYGKDNAEASTLMEMKAYHAISRALEKEGLKDKKSPLNLSSELQDEIGTAFSLFKTDEDITGRLKDRVQPEILEALLKHISFDKFVQISLKALRRIVPLMEQGKRYDEACAEIYGDHYGKKNTEEKIYLPPIPADKIRNPVVLRALSQARKVINGVVRRYGSPARIHIETAREVGKSFKDRKEIEKRQEENRKDREKAAAKFREYFPNFVGEPKSKDILKLRLYEQQHGKCLYSGKEINLVRLNEKGYVEIDHALPFSRTWDDSFNNKVLVLGSENQNKGNQTPYEYFNGKDNSREWQEFKARVETSRFPRSKKQRILLQKFDEDGFKECNLNDTRYVNRFLCQFVADHILLTGKGKRRVFASNGQITNLLRGFWGLRKVRAENDRHHALDAVVVACSTVAMQQKITRFVRYKEMNAFDGKTIDKETGKVLHQKTHFPQPWEFFAQEVMIRVFGKPDGKPEFEEADTPEKLRTLLAEKLSSRPEAVHEYVTPLFVSRAPNRKMSGAHKDTLRSAKRFVKHNEKISVKRVWLTEIKLADLENMVNYKNGREIELYEALKARLEAYGGNAKQAFDPKDNPFYKKGGQLVKAVRVEKTQESGVLLNKKNAYTIADNGDMVRVDVFCKVDKKGKNQYFIVPIYAWQVAENILPDIDCKGYRIDDSYTFCFSLHKYDLIAFQKDEKSKVEFAYYINCDSSNGRFYLAWHDKGSKEQQFRISTQNLVLIQKYQVNELGKEIRPCRLKKRPPVR

SEQ ID NO: 580 - protein, 1082 aa, Neisseria meningitidis
MAAFKPNPINYILGLDIGIASVGWAMVEIDEEENPIRLIDLGVRVFERAEVPKTGDSLAMARRLARSVRRLTRRRAHRLLRARRLLKREGVLQAADFDENGLIKSLPNTPWQLRAAALDRKLTPLEWSAVLLHLIKHRGYLSQRKNEGETADKELGALLKGVANNAHALQTGDFRTPAELALNKFEKESGHIRNQRGDYSHTFSRKDLQAELILLFEKQKEFGNPHVSGGLKEGIETLLMTQRPALSGDAVQKMLGHCTFEPAEPKAAKNTYTAERFIWLTKLNNLRILEQGSERPLTDTERATLMDEPYRKSKLTYAQARKLLGLEDTAFFKGLRYGKDNAEASTLMEMKAYHAISRALEKEGLKDKKSPLNLSSELQDEIGTAFSLFKTDEDITGRLKDRVQPEILEALLKHISFDKFVQISLKALRRIVPLMEQGKRYDEACAEIYGDHYGKKNTEEKIYLPPIPADEIRNPVVLRALSQARKVINGVVRRYGSPARIHIETAREVGKSFKDRKEIEKRQEENRKDREKAAAKFREYFPNFVGEPKSKDILKLRLYEQQHGKCLYSGKEINLVRLNEKGYVEIDHALPFSRTWDDSFNNKVLVLGSENQNKGNQTPYEYFNGKDNSREWQEFKARVETSRFPRSKKQRILLQKFDEDGFKECNLNDTRYVNRFLCQFVADHILLTGKGKRRVFASNGQITNLLRGFWGLRKVRAENDRHHALDAVVVACSTVAMQQKITRFVRYKEMNAFDGKTIDKETGKVLHQKTHFPQPWEFFAQEVMIRVFGKPDGKPEFEEADTPEKLRTLLAEKLSSRPEAVHEYVTPLFVSRAPNRKMSGAHKDTLRSAKRFVKHNEKISVKRVWLTEIKLADLENMVNYKNGREIELYEALKARLEAYGGNAKQAFDPKDNPFYKKGGQLVKAVRVEKTQESGVLLNKKNAYTIADNGDMVRVDVFCKVDKKGKNQYFIVPIYAWQVAENILPDIDCKGYRIDDSYTFCFSLHKYDLIAFQKDEKSKVEFAYYINCDSSNGRFYLAWHDKGSKEQQFRISTQNLVLIQKYQVNELGKEIRPCRLKKRPPVR

SEQ ID NO: 581 - protein, 1082 aa, Neisseria meningitidis
MAAFKPNPINYILGLDIGIASVGWAMVEIDEEENPIRLIDLGVRVFERAEVPKTGDSLAMARRLARSVRRLTRRRAHRLLRTRRLLKREGVLQAANFDENGLIKSLPNTLWQLRAAALDRKLTPLEWSAVLLHLIKHRGYLSQRKNEGETADKELGALLKGVAGNAHALQTGDFRTPAELALNKFEKESGHIRNQRGDYSHTFSRKDLQAELNLLFEKQKEFGNPHISDGLKEGIETLLMTQRPALSGDAVQKMLGHCTFEPTEPKAAKNTYTTERFIWLTKLNNLRILEQGSERPLTDTERATLMDEPYRKSKLTYAQARKLLELDDIAFFKGLRYGKDNAEASTLMEMKAYHAISRALEKEGLKDKKSPLNLSPELQDEIGTAFSLFKTDEDITGRLKDRIQPEILEALLKHINFDKFVQISLKALRRIVPLMEQGKRYDEACAEIYGDHYGKKNTEEKIDLPPIPADEIHNPVVLRALSQARKVINGVVRRYGSPARIHIETAREVGKSFKDRKEIEKRQEENRKDREKAAAKFREYFPNFVGEPKSKDILKLRLYEQQHGKCLYSGKEINLGRLNEKGYVEIDHALPFSRTWDDSFNNKVLVLGSENQNKGNQTPYEYFNGKDNSREWQEFKARVETSRFPRSKKQRILLQKFDEDGFKERNLNDTRYVNRFLCQFVADRMRLTGKGKKRVFASNGQITNLLRGFWGLRKVRAENDRHHALDAVVVACSTVAMQQKITRFVRYKEMNAFDGKTIDKETGEVLHQKTHFPQPWEFFAQEVMIRVFGKPDGKPEFEEADTPEKLRTLLTEKLSSRPEAVHEYVTPLFVSRAPNRKMSGQGHMETVKSAKRLDEGISVLRVPLTQLKLKDLEKMVNREREPKLYEALKARLEAHKDDPAKAFAEPFYKYDKAGNRTQQVKAMRVEQVQKTGVWVRNHNGIADNATMVRVDVFEKGDKYYLVPIYSWQVAKGILPDRAVVQGKDEEDWQLIDDSFNFKFSLHPNDLVEVITKKARMFGYFASCHRGTGNINIRIHDLDHKIGKNGILEGIGVKTALSFQKYQIDELGKEIRPCRLKKRPPVR

SEQ ID NO: 582 - protein, 1082 aa, Neisseria meningitidis
MAAFKPNPINYILGLDIGIASVGWAMVEIDEEENPIRLIDLSVRVFERAEVPKTGDSLAMARRLARSVRRLTRRRAHRLLRARRLLKREGVLQAADFDENGLIKSLPNTPWQLRAAALDRKLTPLEWSAVLLHLIKHRGYLSQRKNEGETADKELGALLKGVADNAHALQTGDFRTPAELALNKFEKESGHIRNQRGDYSHTFSRKDLQAELILLFEKQKEFGNPHVSGGLKEGIETLLMTQRPALSGDAVQKMLGHCTFEPAEPKAAKNTYTAERFVWLTKLNNLRILEQGSERPLTDTERATLMDEPYRKSKLTYAQARKLLGLEDTAFFKGLRYGKDNAEASTLMEMKAYHAISRALEKEGLKDKKSPLRLSPELQDEIGTAFSLFKTDEDITGRLKDRVQPEILEALLKHISFDKFVQISLKALRRIVPLMEQGKRYDEACAEIYGDHYGKKNAEEKIYLPPIPADEIRNPVVLRALSQARKVINGVVRRYGSPARIHIETAREVGKSFKDRKEIEKRQEENRKDREKAAAKFREYFPNFVGEPKSKDILKLRLYEQQHGKCLYSGKEINLGRLNEKGYVEIDHALPFSRTWDDSFNNKVLVLGSENQNKGNQTPYEYFNGKDNSREWQEFKARVETSRFPRSKKQRILLQKFDEDGFKERNLNDTRYVNRFLCQFVADRMRLTGKGKKRVFASNGQITNLLRGFWGLRKVRAENDRHHALDAVVVACSTVAMQQKITRFVRYKEMNAFDGKTIDKETGEVLHQKTHFPQPWEFFAQEVMIRVFGKPDGKPEFEEADTPEKLRTLLAEKLSSRPEAVHEYVTPLFVSRAPNRKMSGQGHMETVKSAKRLDEGVSVLRVPLTQLKLKDLEKMVNREREPKLYEALKARLEAHKDDPAKAFAEPFYKYDKAGNRTQQVKAVRVEQVQKTGVWVRNHNGIADNATMVRVDVFEKGDKYYLVPIYSWQVAKGILPDRAVVQGKDEEDWQLIDDSFNFKFSLHPNDLVEVITKKARMFGYFASCHRGTGNINIRIHDLDHKIGKNGILEGIGVKTALSFQKYQIDELGKEIRPCRLKKRPPVR

SEQ ID NO: 583 - protein, 1082 aa, Neisseria meningitidis
MAAFKPNSINYILGLDIGIASVGWAMVEIDEEENPIRLIDLGVRVFERAEVPKTGDSLAMARRLARSVRRLTRRRAHRLLRTRRLLKREGVLQAANFDENGLIKSLPNTPWQLRAAALDRKLTPLEWSAVLLHLIKHRGYLSQRKNEGETADKELGALLKGVAGNAHALQTGDFRTPAELALNKFEKESGHIRNQRSDYSHTFSRKDLQAELILLFEKQKEFGNPHVSGGLKEGIETLLMTQRPALSGDAVQKMLGHCTFEPAEPKAAKNTYTAERFIWLTKLNNLRILEQGSERPLTDTERATLMDEPYRKSKLTYAQARKLLGLEDTAFFKGLRYGKDNAEASTLMEMKAYHAISRALEKEGLKDKKSPLNLSPELQDEIGTAFSLFKTDEDITGRLKDRIQPEILEALLKHISFDKFVQISLKALRRIVPLMEQGKRYDEACAEIYGDHYGKKNTEEKIYLPPIPADEIRNPVVLRALSQARKVINGVVRRYGSPARIHIETAREVGKSFKDRKEIEKRQEENRKDREKAAAKFREYFPNFVGEPKSKDILKLRLYEQQHGKCLYSGKEINLGRLNEKGYVEIDHALPFSRTWDDSFNNKVLVLGSENQNKGNQTPYEYFNGKDNSREWQEFKARVETSRFPRSKKQRILLQKFDEDGFKERNLNDTRYVNRFLCQFVADRMRLTGKGKKRVFASNGQITNLLRGFWGLRKVRAENDRHHALDAVVVACSTVAMQQKITRFVRYKEMNAFDGKTIDKETGEVLHQKTHFPQPWEFFAQEVMIRVFGKPDGKPEFEEADTLEKLRTLLAEKLSSRPEAVHEYVTPLFVSRAPNRKMSGQGHMETVKSAKRLDEGVSVLRVPLTQLKLKDLEKMVNREREPKLYEALKARLEAHKDDPAKAFAEPFYKYDKAGNRTQQVKAVRVEQVQKTGVWVRNHNGIADNATMVRVDVFEKGDKYYLVPIYSWQVAKGILPDRAVVQGKDEEDWQLIDDSFNFKFSLHPNDLVEVITKKARMFGYFASCHRGTGNINIRIHDLDHKIGKNGILEGIGVKTALSFQKYQIDELGKEIRPCRLKKRPPVR

SEQ ID NO: 584 - protein, 67 aa, Neisseria meningitidis
MFGYFASCHRGTGNINIRIHDLDHKIGKNGILEGIGVKTALSFQKYQIDELGKEIRPCRLKKRPPVR

SEQ ID NO: 585 - protein, 220 aa, Neisseria mucosa
MRHIFSDGLKEGIETLLMTQRPALSGDAVQKMLGHCTFEPTEPKAAKNTYTAERFIWLTKLNNLRILEQGSERPLTNTERATLMDEPYRKSKLTYAQARKLLGLKDTAFFKGLRYGKDNAEASTLMEMKAYHAISRALEKEGLKDKKSPLNLSPELQDEIGTAFSLFKTDEDITGRLKTELTPASNKTLSRPFTVKSASNGSTSAPWLPSTKWFLHFKPA

SEQ ID NO: 586 - protein, 392 aa, Neisseria sp.
MAPFTLKPLNYILGLDIGIASVGWAVVETDSDVLPYRLIDVGVRTFDRAEVPKTGESPAAARRLARSVRRMIRRRAHRMLRARRLLKREGMLQAADFDAHGLVENLPVNPWQLRVDALSRKLMPLEWAAVLLHMVKHRGYLSQRKNERNSSDKELGALLSGVAANSEALQGGDFRTPAELAVNKFEKESGHIRNQRGDYSHTFNRKDVQAELVLLFEKQKEYGNPYISDGLLTGVEDLLMTQRAALSGDAVQKMLGRCTFEPEEYKAAKNTYSAERFVWLTKLNNLRILDQGSERPLTDSERAKLMDEPYKKTKLTYAQVRRLLELDDTAFFKGLRYSKDNAESATLMEMKAYHSISGALEKAGLKNKKIAAGLIARIAGRNRRGVFAIQNR

SEQ ID NO: 587 - protein, 701 aa, Neisseria sp.
MQDEIGEAFSLFKTDEDIRGRLKGKLPDEQLDALLEYVSFDKFVQLSLKALRKILPLMEQGKRYDEACAEIYGDHYGIKDDKQAQFLPPVSADEIRNPVVLRALSQARKVVNAVVRRYGSPARVHIETAREVGKSFLDRKKIEKRQEENRKDRERSIAKFREYFPNFVGEPKAKDILKMRLYEQQQGQCLYSGKAIDLRRLNEKGYVEIDHALPFSRTWDDSFNNKVLVLAGENQNKRNQTPFEWLGGDEKRWREFTARVEHCRFPRSKKQRILMQKLDEKDFKERNLNDTRYVNRFLCNFIAQNMLLTGEDKNRVFASNGQITNLLRGMWGLKKVRESNDRHHALDAVVVACSTVAMQQKITNYVRQKEMNVFDGEMVDKTTGEVSRLHFPQPWDFFRQEVMMRVFGKPDTPSENNEEADTPEKLRALLADKLSSRPEAVHEAVTPLFVSRAPSRKMSGQGHMETIKSAKRLSEGKSVLRVPLTQLTPKLLENMVNREREPQLYEDLLGRLNAHGGDPAKAFAAPFFKRDKAGNPTQQVKAVRVEDVQKSGVIVREGNGVADNATMVRVDVFEKGGKYYLMPIYTWQAAKGILPNKAVIAHTDEANWQEMDTSFTFKFALYPNDLVLASLKKETYFGYFAGLDRSTGNISLRVHDLEKSKGKDGVYRIGVKTALSFQKYQVDELGKTIRPCRLKKRPPVR

SEQ ID NO: 588 - protein, 1089 aa, Neisseria sp.
MTAFKPNPLNYILGLDIGIASVGWAMVEIDDKENPVRLIDLGVRVFERAEMPKTGDSLAAARRLARSVRRLTRRRAHRLLRARRLLKHEGVLKPEDFDENGLVKPLPYIPKQPRNTPWQLRAAALDRKLTPLEWAAVLLHLVKHRGYLSQRKNEGETDDKELGALLKGVADNTHALQAGNFRTPAELALNKFEKESGHIRNQRGDYSHTFSRKDLQAELVLLFEKQKEFGNPYVSDDLKNGIENLLMTQRPALSGDAIQKMLGHCTFEPAEPKAAKNTYTAERFIWLTKLNNLRILNQGNERPLTDAERTTLMDEPYKKSKLTYAQARKLLDLDDTAFFKGLRYGKDNAESATLMEMKAYHAISRALEKEGLKDKKSPLSLSPELQDEIGTAFSLFKTDEEITGRLKGCLQPEILDALLKHISFDKFVQISLKALRRIVPLMEQGKRYDEACAEIYGDHHGRRNSEETLYLPPIPADEIRNPVVLRALSQARKVINGVGRRYGSPARIHIETAREVGKSFKDRKEIEKRQEENRKDREKAAAEFQEYFPNFVGEPKSKDILKLRLYRQQNCKCLYSGKEINLGRLNEKGYVEIDHALPFSRTWDDSFNNKVLVLGSENQNKGNRTPYEYLNGKDNSREWQEFKARVETSRFPHSKKQRILLQKFDEEGFKERNLNDTRYVNRFLCKFVADHMQLTGKGKRRVFASNGQITNLLRGFWGLRKVRAENDRHHALDAVVVACSTVAMQQRITRFVRYKEMNAFDGKTVDKETGEVLHQKTHFPQPWEFFAQEVMIRVFGKPDGKPELEEADTPEKLRALLAEKLSSRPEAVHEYVAPLFVSRAPNRKMSGQGHMETIKSPKRLDEGISVVRVPLTQLKLKDLEKMVNREREPKLYEALKARLEAHKDDPAKAFAEPFYKQDKAGNRTQQVKAVRIEQVQKTGVWVRNQNGIADNATMVRVDVFEKGGKYYLVPIYSWQVAKGILPDKAIIAFKDEEEWQLIDDSFNFKFPLHPNDLVEVITKKARIFGYFASCHRGTGNINIRIHDLDNKVGKNGILEGIGVKTALSFQKYQIDELGKEIRPCRLKKRPPVR

SEQ ID NO: 589 - protein, 1097 aa, Neisseria wadsworthii
MKKQPQRYILGLDLGIASVGWALILVDGAENPVGLLDCGVRTFERAEVPKTGDSLALARRQARSVRRLIRRRAHRLLRLRRLLKREGILSAADFNSDGLPNLPIDAWQLRVAGLERKLTNQEWAAVLLHLVKHRGYLSQRKSETQTENKELGRLLAGVAENSKLLSESSEQYRTPAELAVKLFAEQSGHLRNKGGEYTHTFNRLDLQKELHLLFERQYALGNPFASAELQSKVDELLMTQRSALQGEAVLKMLGKCTFEPSEYKAAKNTYSAERFIWLTKLNNLRILYNGEERALDEGDRKKLLDEPYKKAKLTYKQVRSILNLPESAVFKGLRYGKDSDGLKAENGTLMEMKAYHKIRTILDKAGLKGEWENRIRNPEILDKIGTAFSLYKTDEDIQAALADLRLPENVLDALLAGLNFDKFIQLSLKALRNILPLMERGIRYDEACKEVYGDHRALAESKNQVLLPPIPADEIRNPVVLRTLTQARKVINAIIRRYGSPQRVHIETARELGKSKQERDKIDRKNKENQNDRNRLASDIRKHFNFEPTPKDILKLRLYEQQHGKCLYSDLREEKGECLYTGNVIELHRLFEDGYVEIDHALPLSRTWDNSLNNKVLVLKSSNQNKGNKTPYEWLDGANNSRRWREFQARVQGCHFPYVKKQRIQTAKLDSKAEQGFLERNLNDTRYISKFMCQFITANLRLAETSNALMEEVAGENPYWKERKRQRVFAPSGSIIALLRGLWGLKKVREDNDRHHALDAIVVACSTVSMQQKITKAMQRRETLETVDSETGEVKTRIPQPWDFFRQEVMIRVFSDSPREELAEKLNSRPEALHDFVSPLFVSRAPNRKMTGQGHLETVKSAKRLSENISVVRKPLTALKLKDIENIVGYPDREPALYQALRERLLAHKDDPVKAFADKPFYKPAKDGGQGSLVKAVRIIENTKHGLKIRNGITDTNGDMVRTDVYQKTDKKGKRQYFIVPVYAWQVEKNELPTVDCKGYEIDDNYEFCFSLYKYDLIEIQNPNDINQELRAYYINCDSSDGRFWLAYHDKSAKEQQFRISTQNQPIIKKYQVDTLGKEIRLCKAEKRTALNGKKKK

SEQ ID NO: 590 - protein, 1426 aa, Niabella soli
MPRKNILGLDLGTTSIGFAKIIEDDDYQCSSVELIGVRVNPLTTDEQTNFEKGKPVSVNADRTLKRGMRRNLDRYQLRRDYLIEILRTHHIITADTKLAEDGKNTTHTTYALRALAATAEIPLEAFVRVLLAINKKRGYKSSRKAKNEDEGQLIDGMAIARRLYEESLTPGQFSYQLLKEGKKYLPDFYRSDLNTELNKVWNFQKQFYPEILTDEFKRHLEGKGQRATAVAFWGQHGFSMAENKGSREEKKLHAYKWRSEAAHKQLTKEEVAFVITEINNDLNKSSGYLGAISDRSKELFFNKQTVGQYLHQQLKENPHTRLKGQVFYRQDYLDEFETIWEMQAKFYSALTLELKEEVRDVVIFYQRKLKSQMGLISLCEFESKEIEIEKNGEKAKKRIGLRVAPKSSPLFQEFKIWQVLNNLEFRNKKTKEVFVPEMAAKQQLFDELNIKGNLLASEAIKILGYKTKDWEANYHTLEGNRTNKSLYDAWLKILELEGYDENLLKLSGSDDIDVSKIEKPALEIRQMVLAVFEVLGISGAILDFDAEADGKAFEQQPAYQLWHLLYSAEDDGKKYSQEDIFTYGHDNIGLKKKLCEKFGFRPEHTKILVNVVFSDDYGNLSSKAMRRIYPFIKELTYDKACAEAGYRHSAASLTKEEIAARPLQNRLDLLKKNELRSPVVEKILNQMVNVVNTLVDDENQNRKARGLSEDFHFDEIRIELARELKKNAKERAEMTTNINTAKQSHEKIIRILQTEFGVPNPSRNDIVRYKLYEELKNNGYKDLYTNTYISRDILFSKQIDVDHIIPQMSLFDDSFSNKTVVFRKDNQDKGNKTAYDYILGKYGEQALEEYISRITSLFELGKKNKEEGIGKAKFQKLQKRLVDIGDGFIERDLRESQYIAKKANNMLYAICRSVVSTSGEITARLREDWDLVNVMQEINLPKFRALGLTEMVEKKDGAQKERITDWTKRNDHRHHAMDALAIAFTRHSHIQYLNHLNARKDEANKWHPVVSKIEEKETVLIYDDLGNRKRKFKAPMPNFREVVKEHLENVLISHKAKNKVVTKNKNKIKTVRGEKVKTELTPRGQLHKETIYGRYRYYESKEEKIGPKFDAEMIGMVTNPQYKKLLLERLAANGNDPKKAFWGKNALNKNPLYVDEARQELLPEKILLRWLNDDYSIRKDVTPENLKDIKTIEKILDKGVKKILLKRLADFGNDPKKAFSDLDKNPIWQNEAKRIAIKRVTISGIKNAAPLHHKKDHLGNDILDEKGKQIPSSFVSTGNNHHVAIYRDAEGNLQERVVSLFDAVQLVNGGEPVIDKEYNKGIGWQFLFTMKQNEMFVFPDEKTGFNPREVDLLSSGNRKLISPNLFRVQKLASKNYFFRHHLETSVEEKKELKNIAYKPQLGLNALSNIVKVRINHIGEIVSVGEY

SEQ ID NO: 591 - protein, 79 aa, Nitritalea halalkaliphila
MPLRLPERVYKMISSTGAECHFLPVNVSSLIKGYDAKSKLGEFGSQNKQEVTSDSFIRVKERCYKLEINRLGIPLNRLK

SEQ ID NO: 592 - protein, 1498 aa, Odoribacter laneus
METTLGIDLGTNSIGLALVDQEEHQILYSGVRIFPEGINKDTIGLGEKEESRNATRRAKRQMRRQYFRKKLRKAKLLELLIAYDMCPLKPEDVRRWKNWDKQQKSTVRQFPDTPAFREWLKQNPYELRKQAVTEDVTRPELGRILYQMIQRRGFLSSRKGKEEGKIFTGKDRMVGIDETRKNLQKQTLGAYLYDIAPKNGEKYRFRTERVRARYTLRDMYIREFEIIWQRQAGHLGLAHEQATRKKNIFLEGSATNVRNSKLITHLQAKYGRGHVLIEDTRITVTFQLPLKEVLGGKIEIEEEQLKFKSNESVLFWQRPLRSQKSLLSKCVFEGRNFYDPVHQKWIIAGPTPAPLSHPEFEEFRAYQFINNIIYGKNEHLTAIQREAVFELMCTESKDFNFEKIPKHLKLFEKFNFDDTTKVPACTTISQLRKLFPHPVWEEKREEIWHCFYFYDDNTLLFEKLQKDYALQTNDLEKIKKIRLSESYGNVSLKAIRRINPYLKKGYAYSTAVLLGGIRNSFGKRFEYFKEYEPEIEKAVCRILKEKNAEGEVIRKIKDYLVHNRFGFAKNDRAFQKLYHHSQAITTQAQKERLPETGNLRNPIVQQGLNELRRTVNKLLATCREKYGPSFKFDHIHVEMGRELRSSKTEREKQSRQIRENEKKNEAAKVKLAEYGLKAYRDNIQKYLLYKEIEEKGGTVCCPYTGKTLNISHTLGSDNSVQIEHIIPYSISLDDSLANKTLCDATFNREKGELTPYDFYQKDPSPEKWGASSWEEIEDRAFRLLPYAKAQRFIRRKPQESNEFISRQLNDTRYISKKAVEYLSAICSDVKAFPGQLTAELRHLWGLNNILQSAPDITFPLPVSATENHREYYVITNEQNEVIRLFPKQGETPRTEKGELLLTGEVERKVFRCKGMQEFQTDVSDGKYWRRIKLSSSVTWSPLFAPKPISADGQIVLKGRIEKGVFVCNQLKQKLKTGLPDGSYWISLPVISQTFKEGESVNNSKLTSQQVQLFGRVREGIFRCHNYQCPASGADGNFWCTLDTDTAQPAFTPIKNAPPGVGGGQIILTGDVDDKGIFHADDDLHYELPASLPKGKYYGIFTVESCDPTLIPIELSAPKTSKGENLIEGNIWVDEHTGEVRFDPKKNREDQRHHAIDAIVIALSSQSLFQRLSTYNARRENKKRGLDSTEHFPSPWPGFAQDVRQSVVPLLVSYKQNPKTLCKISKTLYKDGKKIHSCGNAVRGQLHKETVYGQRTAPGATEKSYHIRKDIRELKTSKHIGKVVDITIRQMLLKHLQENYHIDITQEFNIPSNAFFKEGVYRIFLPNKHGEPVPIKKIRMKEELGNAERLKDNINQYVNPRNNHHVMIYQDADGNLKEEIVSFWSVIERQNQGQPIYQLPREGRNIVSILQINDTFLIGLKEEEPEVYRNDLSTLSKHLYRVQKLSGMYYTFRHHLASTLNNEREEFRIQSLEAWKRANPVKVQIDEIGRITFLNGPLC

SEQ ID NO: 593 - protein, 1389 aa, Oenococcus kitaharae; identical to SEQ ID NO: 250

SEQ ID NO: 594 - protein, 1535 aa, Ornithobacterium rhinotracheale
MNTILGLDLGTNSIGWALIKVLNDKTRLPLEIIDLGVVVIPTDQRTLDKFSKGESISKTAERTKQKGVRKLYERKKLRRERLHRVLNILGFLPEHYSKKIDFKKHLGQFFGNSQPKISYVENDHGKHEFIFMDSYREMLKEFSKHNIKNVPYDWTIYYLRKKALSQKISKEELAWVILNFNKKRGYYQFRDDNADENKENKIEKYYALKVTNVKKEDAQNYTITLENGWIYKNKSKISLLDWVGSTKEFISTEKFDNKGNIIKKKNGEDDRTLKLVDSEKDWIAIKKSTEDRIENYGKTVGTYLYEHLLKDPNQKLNGELINIIDRKFYKNELKQILEKQKEFHPELLNEDLFQKSIIELYPKNSTRQKELKNKDLCYLLIDDVIYYQRDLKKKNSTINKCSFESREYYLNGEKQIQKINCIAKSKPLYQEFRTLQFIKNLKVYEIIDGLEKDITSKLLPDFETKEHFFEWLNDKEKIDQLQLLSYKCFDLHDNVKNDLIAKGIKRPTEKAIRTELLEKYRWNYSKDNDRNFLLNETRFKILKYLKKVDKKLTLTNEQIESLWLLLYSAKDERELKNGLQKFSEKNKLPKKFSDIFISFPPFKKEYGAYSEKALKKLLSLVRFGKYWSFNKIDNNIQNKIMNILNGEVDDSISDRVREKTILLQDKNDFQDLPLWLASYVAYNRFSEVSEIKYWDSPDKIEFLKQHSIGNPIVEKIINETLKLIKDIWVIHGKSCKNFFSEIHIELSREIKSSSKKRAQITNNNTKNQKLNNLIKSLLIEMASDTKYENVTPYSPSQQEILKIYDEGIYSKEENSEKIKEINKIRNNNKISKSDITKYKLWLEQGYISPYTGKIIPLTKLFTAKYQKEHIIPQTKFFDDSFNNKVICEAEVNKLKDNSLAMNFIKAKGGKAVKLSDGETVTILNQEEYKQLVRTSFKKNSIKLRNLLLEEIPDTFTKRQLNDTKYISKLVLSLLSNIVREKGELESTAKRIVSTNGQITSILRNDWGLNNIWNKLITPRFERLNNINKNKIYGNWENKKGKNVFQINYLNDNLSTLNTKRIDHRHHALDALIVACTTRNHINFLNNQYAKSRNQRHDLRAKLKRRETITTEGSKKQVFKDFIKPWESFTQDALKKLETTIVNFKVNKRIINKTINWYKKWEKQKDGTYKKIQKKQTKGDAWAIRKPLHIDTIYGIVCKKLPLKSALENYKNIIDENLKHKIKELKEVNKFDNNQIINFFKECNFIFEDNNIQKVEVYDFKDNRDKTILSSSRQLIDESFTPKKIGKVLDPTIRNILLKHLNSTKYNNKFDSDGNPIKPEKLAFSPEGLKDLNKNIKHLNNNKEHQPIKRVKLFETLGNKIKVGYTQQKNKKFAETATGTNLFLGIYSDNNKRDFKTIPLILAIQREKEGLNPCPDTDEKGNQLLFSLSPNELVFVPNNEERKNPNLVDFENLSKDQIDRIYKFVSCTGSEAYFVPSRTAKPIIENENGTNNKSQRIIEFNEKTSIKNEKNEPVLIKTICWKIEVNRLGKIIKVIK

SEQ ID NO: 595 - protein, 103 aa, Parabacteroides merdae
MIVYRLFYRFLFKATKLVNFVIHKELKRQIARTGKIKFHSGGCGCQSGNYKMQNFEKGKSITTNADRTLKRSMRRNLYRCKLRRDVLIELLKKVGFIPEKQWK

SEQ ID NO: 596 - protein, 82 aa, Parabacteroides merdae
MSIWKLQYPPLDLKIYNKFLVYSRVNPLTVDEMQNFEKGKSITTNADRTLKRSMRRNLQRYKLRRDVLIELLKKVGFMSEKQ

SEQ ID NO: 597 - protein, 84 aa, Parabacteroides merdae
MSIWKLQYPPLDLKIYNKFLVYSRVNPLTVDEMQNFEKGKSITTNADRTLKRSMRRNLYRCKLRRDVLIELLKKVGFIPEKQWK

SEQ ID NO: 598 - protein, 398 aa, Pasteurella bettyae
MLANENQNKGNLTPYEWLDGKNNSKRWQDFVARVQTCCFSHRKKQHILSHKLDEKSFIERNLNDTRYVARFLCNFIADNMLLTGKGKRKVFASNGQITALLRGRWGLQKVRDDNDRHHALDAVVIACSTVAMQQKITRFVKYEEGNVFSGERIDRETGEIIPLYFPTPWKFFKENVEIRIFSENPKLELENRLPDYPQYNHEFVQPLFVSRMPTRKMTGQGHMETIKSAKRLDEGISVLKVPLTQLKLADLENMVNRERELALYEALKERLELFGNDPAKAFIEPFYKKGGALVKAVRVKKVQKSGVLVRDGNGVADNALMVRVDVFTKGGKYFLVPIYTWQVAKGILPNKAVTANIDEIDWLEMDESYQFIFTMYPNDLVKVKLKKEEFFGYYGGLD

SEQ ID NO: 599 - protein, 610 aa, Pasteurella bettyae
MNMLKPLNYILGLDLGIGSVGWAVVEIDEQGNPLRLIDVGVRTFERAEVAKTGESLALARRLARSSRRLVKRRAARIKKAKRLLKAENILLSVDEILPNDVWQLRVKGLDHKLERQEWAAVLLHLLKRRGYLSQRKNESKSENKELGALLSGVVTNHQILQTDEYRTPAEIAVHKFQAEDGHIRNQRGDYTHTFSRLDLLAEMELLFQRQTELGNLHTSSKLLENLTALLMWQKPALAGEAILKMLGKCTFEPTEYKAAKNSYSAERFVWLTKLNNLRILEQGAERALTDSERFVLLDQPYEKAKLTYAQVRTLLKLSDEAIFKGVRYQGEDKKTVESKTTLMEMKAYHQIRKALDGADLKDEWNTLKNDSALLDEIGTAFSLYKTDDDISHYLGGKLSEKVLNVLLENLNFDKFIQLSLKALQKILPLMLQGQRYDEAVSAVYGDHYGKKSAESCRLLPAIPANEIHNPVVLRTLTQARKVINAVVRLYGSPARIHIETGRKVGKSYQDRKKLEKQQEENREQRESAVKKFKEYFPNFVGEPKGKDILKLRLYELQQSKCLYSGKSFDPNRLLEKGYVEVDHALPFSRTWDDSFNNKVCLPMKTRIKAI

SEQ ID NO: 600 - protein, 199 aa, Pasteurella multocida
MACATPSMQQKITRFIRFKEVHPYKIENRYEMVDQESGEIISPHFPEPWAYFRQEVNIRVFDNHPDTVLKEMLPDRPQANHQFVQPLFVSRAPTRKMSGQGHMETIKSAKRLAEGISVLRIPLTQLKPNLLENMVNKEREPALYAGLKARLAEFNQDPAKAFTTPFYKQGGQQVKAIRVEQVQKSGVLVRENNGVADNA

SEQ ID NO: 601 - protein, 63 aa, Pasteurella multocida
MQTTNLSYILGLDLGIASVGWAVVEINENEDPIGLIDVGVRIFERAEVPKTGESLALSRRLAR

SEQ ID NO: 602 - protein, 1058 aa, Pasteurella multocida
MQTTNLSYILGLDLGIASVGWAVVEINENEDPIGLIDVGVRIFERAEVPKTGESLALSRRLARSTRRLIRRRAHRLLLAKRFLKREGILSTTDLEKGLPNQAWELRVAGLERRLSAIEWGAVLLHLIKHRGYLSKRKNESQTNNKELGALLSGVAQNHQLLQSDDYRTPAELALKKFAKEEGHIRNQRGAYTHTFNRLDLLAELNLLFAQQHQFGNPHCKEHIQQYMTELLMWQKPALSGEAILKMLGKCTHEKNEFKAAKHTYSAERFVWLTKLNNLRILEDGAERALNEEERQLLINHPYEKSKLTYAQVRKLLGLSEQAIFKHLRYSKESAESATFMELKAWHAIRKALENQGLKDTWQDLAKKPDLLDEIGTAFSLYKTDEDIQQYLEGKLPDSVINALLVSLNFDKFIELSLKSLRKILPLMEQGKRYDQACHEIYGHHYGEKNQQISQLLPVIPTQEIRNPVVLRTLSQARKVINAIIRQYGSPARVHIETGRELGKSFKERREIQKQQEDNRTKRESAVQKFKELFSDFSSEPKSKDILKFRLYEQQHGKCLYSGKEINIHRLNEKGYVEIDHALPFSRTWDDSFNNKVLVLASENQNKGNQTPYEWLQGKINSERWKNFVALVLGSQCSAAKKQRLLTQVIDDNKFIDRNLNDTRYIARFLSNYIQENLLLVGKNKKNVFTPNGQITALLRSRWGLIKVRENNDRHHALDAIVVACATPSMQQKITRFIRFKEVHPYKIENRYEMVDQESGEIISPHFPEPWAYFRQEVNIRVFDNHPDTVLKEMLPDRPQANHQFVQPLFVSRAPTRKMSGQGHMETIKSAKRLAEGISVLRIPLTQLKPNLLENMVNKEREPALYVGLKARLAEFNQDPAKAFATPFYKQGGQQVKAIRVELVQKSGVLVRQGNGVADNAPGSIVRTDVFIKNNKFFLVPIYTWQVAKGILPNKAIVAHKNEDEWEEMDEGAKFKFSIFPNDLIELRTKTECFLGYYIGPDRHNGSISLREHDSEISKGNAGVYRVGVKLALSLEKYHIDELGKNRRICRPHQRRPVR

SEQ ID NO: 603 - protein, 1056 aa, Pasteurella multocida
MQTTNLSYILGLDLGIASVGWAVVEINENEDPIGLIDVGVRIFERAEVPKTGESLALSRRLARSTRRLIRRRARRLLLAKRFLKREGILSTTDLEKGLPNQAWELRVAGLERRLSAIEWGAVLLHLIKHRGYLSKRKNESQTNNKELGALLSGVAQNHQLLQSDDYRTPAELALKKFAKEEGHIRNQRGAYTHTFNRLDLLAELNLLFAQQHQFGNPHCKEHIQQYMTELLMWQKPALSGEAILKMLGKCTHEKNEFKAAKHTYSAERFVWLTKLNNLRILEDGAERALNEEERQLLINHPYEKSKLTYAQVRKLLGLSEQAIFKHLRYSKENAESATFMELKAWHAIRKALENQGLKDTWQDLAKKPDLLDEIGTAFSLYKTDEDIQQYLTNKVPNSVINALLVFLNFDKFIELALKSLRKILPLMEQGKRYDQACREIYGHHYGEANQKTSQLLPAIPAQEIRNPVVLRTLSQARKVINAIIRQYGSPARVHIETGRELGKSFKERREIQKQQEDNRTKRESAVQKFKELFSDFSSEPKSKDILKFRLYEQQHGKCLYSGKEINIHRLNEKGYVEIDHALPFSRTWDDSFNNKVLVLASENQNKGNQTPYEWLQGKINSERWKNFVALVLGSQCSAAKKQRLLTQVIDDNKFIDRNLNDTRYIARFLSNYIQENLLLVGKNKKNVFTPNGQITALLRSRWGLIKIRENNDRHHALDAIVVACATPSMQQKITRFIRFKEVHPYKIENRYEMVDQESGEIISPHFPEPWAYFRQEVNIRVFDNHPDTVLKEMLPDRPQANHQFVQPLFVSRAPTRKMSGQGHMETIKSAKRLAEGISVLRIPLTQLKPNLLENMVNKEREPALYAGLKARLAEFNQDPAKAFTTPFYKQGGQQVKAIRVEQVQKSGVLVRENNGVADNASIVRTDVFIKNNKFFLVPIYTWQVAKGILPNKAIVAHKNEDEWEEMDEGAKFKFSLFPNDLVELKTKKEYFFGYYIGLDRATGNISLKEHDGEISKGKDGVYRVGVKLALSFEKYQVDELGKNRQICRPQQRQPVR

SEQ ID NO: 604 - protein, 134 aa, Pasteurella multocida
MVNKEREPALYAGLKARLAEFNQDPAKAFTTPFYKQGGQQVKAIRVEQVQKSGVLVRENNGVADNASIVRTDVFIKNNKFFLVPIYTWQVAKGILPNKAIVAHKNEDEWEEMDEGAKFKFSLFPNDLVELKTKK

SEQ ID NO: 605 - protein, 53 aa, Pasteurella multocida
YSKENAESATFMELKAWHAIRKALENQGLKDTWQDLAKKPDLLDEIGTAFSLL

SEQ ID NO: 606 - protein, 1366 aa, Pediococcus acidilactici
MGDRKYNLGLDIGTSSIGFAAVDENNQPIRVKGKTAIGVRLFEEGKTAADRRGFRTTRRRLSRRRWRINLLNEIFDAHLAEVDPTFLARLKESNRSNLDPKKSFQGSLLFPERKDYQFYEEYPTIYHLRKALMEEDRKFDIREIYLAVHHIIKYRGNFLNGTPMRSFKVENIELDTLFDQLNQLYAEIVPDNELAFDLAQVADVKDVLSSTTIYKMDKKKQLVKMMLLPASNKALQSENKKIVTQFVNAILNYKFKLDVLLQVETDADWSLKLNDEGADDKLEEFTGDLDENRLEIIDLLQRLHNWFSLNEITKDGNSLSAAMVEKYENHHHHLGLLKKVIENHPDAKKAKALKETYTAYVGKTDDKTQNQDDFYKAVEKNLDDSPDAKEIKRLIQLDQFMPKQRTGQNGAIPHQLHQQELDQIIEKQSKYYPFLAEPNPNVKRRKDAPYKLDELIAFKIPYYVGPLVTPEEQAQNKENVFAWMKRKAAGPITPWNFDEKVDRMESANRFIRRMTTKDTYLFGEDVLPAESMIYQKFVVLNELNNLKINGRHLSLKDKQDVYNDLFKQQKTVSIKALQNYYVTKKKAATAPTVGGLADPKKFLSSLSTYIDFKNMFGERVNDPQFQEDLEQIVEWSTIFEDRGIFKAKLQALGWLSEKQIQQLVAKRYKGWGRLSKKLLTGLKNAEGYSILDEMWRSTENFMQIQTRPEFAALIQQANEKQFEGNDPNNVWENIESILGDAYTSPQNKKAIRQVVKVVQDIEKAVGNPPEKIAIEFTREAAANPQRTQSRLRTLEKLYESAEEVVDAGLTAELAEFKENKHVLSDKYYLYFTQLGRDVYTGDTISLDKLNDYDVDHILPQSFIKDDSLDNRVLTIRAVNNGKSDNVPAKMFGKKMGSFWRYLLDNGMISKRKYNNLITDPDNISKYAQKGFINRQLVETSQVIKLTANILNGIYDKDTEIIEVPAKMNSQMRKMFDLVKVREVNDYHHAFDAYLTIFIGKYLYKCYPKLRPYFVYGKFKKFGDNEDIEVGDGRFNFLNRIERLKNVTDPETGEILWSNVAPNETIKQIKKVYNYKFMLVSRETTTRRAELFNQTVYPKNYRGKLIPIKEDRPTDLYGGYSGNTDAYLAIVALEDKKKGKYFKVVGIPTRAAAKLEKLKQQDSQQYLQALHKVIAPQFTKSTKKGIKKTEFEIVLDKVHYRQLVQDGPVKMMLGSSTYKYNAKQLVLSEKALQVIADDRKFDETQKDDNLIAVYDEILSIVNQSFDLYDINGFRKKLNDNRDQFIDLPAETKYEGRKVVAHGKREMILEILKGLHANAAFGNLKPIGFSTAFGQLQVPNGIILSKNAILIHQSPSGLFERKIKLSDL

SEQ ID NO: 607 - protein, 1229 aa, Pediococcus acidilactici; identical to SEQ ID NO: 139

SEQ ID NO: 608 - protein, 270 aa, Pediococcus lolii
LFNQTIYSAKASKTMIPIKNDRPTKLYGGYSGNEDAYMSIIRLSDKKKTYKVVGISMRDASKLKAYENNAHEEYLKKLKEVIEQQFLDSGKKTKADFEIVIPKVNYHQRMQDGTKQFRIGSSKYVHNTKQLVLSEKTLKAIRNNKQYNGDAEKDLINAFDEILTIVNDSFSIFDIRSFRKKLNESRDKFVSLPVEDTKEKSKVIKGKRETLKQILIALHANGTSQDIPQLGLKSFGKMVKTGGLTLSENTALIHQSPSGLFEHKIKLSDL

SEQ ID NO: 609 - protein, 1016 aa, Pediococcus lolii
MNGIFDAHLAEVDPTFLARLKESNRSNLDPKKSFQGSLLFPERKDYQFYKEYPTIYHLRKALMEKDRKFDIREIYLAVHHIIKYRGNFLNGTPMRSFKVENIELDTLFDRLNQLYEEIIPDNELAFDLEQVADVKEVLSSTTIYKMDKKKQLVKMMLLPASNKALQSENKKIVTQFVNAILNYKFKLDVLLQVETDADWSLKLNDEGADDKLEEFTGDLDENRLEIIDLLQRLHNWFSLNEITKDGNSLSAAMVEKYKDHRHHLELLKKVIEDHSDAKKAKALKETYTAYVGKTDDKTQNKDDFYKAVEKNLDDSPEAKEIKRLIQLDQFMPKQRTGQNGAIPHQLHQQELDQIIEKQSKYYPFLAEPNPNVKRRKDAPYKLDELIAFKIPYYVGPLVTPEEQAQNKENVFAWMKRKAAGPITPWNFDEKVDRMESANRFIRRMTTKDTYLFGEDVLPAESMIYEKFVVLNELNNLKINGRHLSLKDKQDIYNDLFKQQKTVSIKALQNYYVTKKKAATAPTVGGLADPKKFLSSLSTYIDFKNMFGERVNDPQFQEDLEQIVEWSTIFEDRGIFKAKLQALGWLSEKQIQQLVAKRYKGWGRLSKKLLTGLKNAEGYSILDEMWHSTENFMQIQTRPEFAALIQQANEKQFEGNDPDNVWENIENILGDAYTSPQNKKAIRQVVKVVQDIEKAVGNPPEKIAIEFTREAAANPQRTQSRLRTLEKLYESAEEVVDAGLTAELAEFKENKHVLSDKYYLYFTQLGRDVYTGDTISLDRLNDYDVDHILPQSFIKDDSLDNRVLTIRAVNNGKSDNVPAKMFGKKMGSFWRYLLDNGMISKRKYNNLITDPDNISKYAQKGFINRQLVETSQVIKLTANILNGIYDKDTEIIEVPAKMNSQMRKMFDLVKVREVNDYHHAFDAYLTIFIGNYLYKCYPKLRPYFVYDNFKKFGNKEDIGHKRFNFLGKIERDKKVVAPETGEILWSNVAPNETIKQIKKVYDYKFMLTSHETYTKHG

SEQ ID NO: 610 - protein, 1333 aa, Planococcus antarcticus
MKNYTIGLDIGVASVGWVCIDENYKILNYNNRHAFGVHEFESAESAAGRRLKRGMRRRYNRRKKRLQLLQSLFDSYITDSGFFSKTDSQHFWKNNNEFENRSLTEVLSSLRISSRKYPTIYHLRSDLIESNKKMDLRLVYLALHNLVKYRGHFLQEGNWSEAASAEGMDDQLLELVTRYAELENLSPLDLSESQWKAAETLLLNRNLTKTDQSKELTAMFGKEYEPFCKLVAGLGVSLHQLFPSSEQALAYKETKTKVQLSNENVEEVMELLLEEESALLEAVQPFYQQVVLYELLKGETYVAKAKVSAFKQYQKDMASLKNLLDKTFGEKVYRSYFISDKNSQREYQKSHKVEVLCKLDQFNKEAKFAETFYKDLKKLLEDKSKTSIGTTEKDEMLRIIKAIDSNQFLQKQKGIQNAAIPHQNSLYEAEKILRNQQAHYPFITTEWIEKVKQILAFRIPYYIGPLVKDTTQSPFSWVERKGDAPITPWNFDEQIDKAASAEAFISRMRKTCTYLKGQEVLPKSSLTYERFEVLNELNGIQLRTTGAESDFRHRLSYEMKCWIIDNVFKQYKTVSTKRLLQELKKSPYADELYDEHTGEIKEVFGTQKENAFATSLSGYISMKSILGAVVDDNPAMTEELIYWIAVFEDREILHLKIQEKYPSITDVQRQKLALVKLPGWGRFSRLLIDGLPLDEQGQSVLDHMEQYSSVFMEVLKNKGFGLEKKIQKMNQHQVDGTKKIRYEDIEELAGSPALKRGIWRSVKIVEELVSIFGEPANIVLEVAREDGEKKRTKSRKDQWEELTKTTLKNDPDLKSFIGEIKSQGDQRFNEQRFWLYVTQQGKCLYTGKALDIQNLSMYEVDHILPQNFVKDDSLDNLALVMPEANQRKNQVGQNKMPLEIIEANQQYAMRTLWERLHELKLISSGKLGRLKKPSFDEVDKDKFIARQLVETRQIIKHVRDLLDERFSKSDIHLVKAGIVSKFRRFSEIPKIRDYNNKHHAMDALFAAALIQSILGKYGKNFLAFDLSKKDRQKQWRSVKGSNKEFFLFKNFGNLRLQSPVTGEEVSGVEYMKHVYFELPWQTTKMTQTGDGMFYKESIFSPKVKQAKYVSPKTEKFVHDEVKNHSICLVEFTFMKKEKEVQETKFIDLKVIEHHQFLKEPESQLAKFLAEKETNSPIIHARIIRTIPKYQKIWIEHFPYYFISTRELHNARQFEISYELMEKVKQLSERSSVEELKIVFGLLIDQMNDNYPIYTKSSIQDRVQKFVDTQLYDFKSFEIGFEELKKAVAANAQRSDTFGSRISKKPKPEEVAIGYESITGLKYRKPRSVVGTKR

SEQ ID NO: 611 - protein, 211 aa, Porphyromonas catoniae
MGKKVLGLDLGVGSIGWCLITLDKDEKPQSILGMGSRIVPLSADDATEFTQGKAITKNKMRTVARTIRKGMDRYQLRREALKKVLREHAMLPDEALIKLPLLELWELRARAATPGEQVSLTELGRVLLHINQKRGYKHAKADEAAEAETKKGKETGYVAQVKGRYQILKEKGLTIGQHFAGELRANQQTAPRGTYYTYRIKEQVYPRVRGV

SEQ ID NO: 612 - protein, 1009 aa, Porphyromonas catoniae
MRIIREAYIEEYDRIMAVQRVFYPELLTDALIGRIRDRIIFYQRPLKSCKQLVSFCEFEKKEKVIRVKHTNKEGVQELVEKTITIGPKVAPKSSPIFQVCKVWESIHNIRLYHPDGTERKLEQEEKQKLFDYLQRNDKLSLTTLRKELKIKPKDKLWCDKLLEKGIAGNTTAAILRKAFKGYEHYERLFRFDLVRRDSHEADEDGVIRPIIDESYQNEPLYKLWHILYSIEDRAEMRSALIGQLGIKAEDLDNGLMDALYKIDFVKQGYGNKSAKFICKLLPHLQEGKMYSEAAEAAGMRHSDSMTAQERDERNLLEEIPLLQKNALRQPVVEKVLNQMINLVNALKREHGEIDEVRVELARELKMSREEREKATKNNSSREKENKAIAERITEYGLTPTKSRIQKYRLWQESAESCIYCGKRVDVVQFLRGEETEVEHIIPKSILFDDSLSNKACACRSCNQEKGNRFAMEYIQAKGWEQDYIERVDSLFHDKKISYSKRQHLLMLPKDLPEDFIERHLRLSQYISREAQGILRKGIRLVSASEGGVTAKLRQLWGYDNILRDLNLERYKSMGETEVVTVEHRDGQRTDERIKDWSKRKDHRHHAIDALVVACTRQSYIQRLNRVNAEADRQEMDAFIKEQQQEHKLSKKEKLSLLENWLKEQPHFTTGEVKEHAEGILISFRPGKRTVSRGRNIYKRSGKTDVQRNVLIPRGALSEETVYGVISVDGENKVVCKYPLQKFLDTKETNVDKIADQAAEKIVDKVLREKIRERIKRYGKKEAFAEPLYLDEAQTQVVRSVRCFISKDQAKLIPLRYNDESEAVGFVAPGNNHHLALYRDASGKMRASVVSFFAAVERARYGIPMIVLNPRETREKARIIPDLPESIFSKLPEEDWVLEETLQEGEMVLLGMENDAIEEAIKKKDYSKLSRYLYRVQSLSYNDYKFCFHLETESEKKEKKKGEDKKRGEKAKNTAVMPPKRYRIRCLATYQEDLNPRKVKIDLLGRISLA

SEQ ID NO: 613 - protein, 1197 aa, Porphyromonas sp.
MLMSKHVLGLDLGVGSIGWCLIALDAQGDPAEILGMGSRVVPLNNATKAIEAFNAGAAFTASQERTARRTMRRGFARYQLRRYRLRRELEKVGMLPDAALIQLPLLELWELRERAATAGRRLTLPELGRVLCHINQKRGYRHVKSDAAAIVGDEGEKKKDSNSAYLAGIRANDEKLQAEHKTVGQYFAEQLRQNQSESPTGGISYRIKDQIFSRQCYIDEYDQIMAVQRVHYPDILTDEFIRMLRDEVIFMQRPLKSCKHLVSLCEFEKQERVMRVQQDDGKGGWQLVERRVKFGPKVAPKSSPLFQLCCIYEAVNNIRLTRPNGSPCDITPEERAKIVAHLQSSASLSFAALKKLLKEKALIADQLTSKSGLKGNSTRVALASALQPYPQYHHLLDMELETRMMTVQLTDEETGEVTEREVAVVTDSYVRKPLYRLWHILYSIEEREAMRRALITQLGMKEEDLDGGLLDQLYRLDFVKPGYGNKSAKFICKLLPQLQQGLGYSEACAAVGYRHSNSPTSEEITERTLLEKIPLLQRNELRQPLVEKILNQMINLVNALKAEYGIDEVRVELARELKMSREERERMARNNKDREERNKGVAAKIRECGLYPTKPRIQKYMLWKEAGRQCLYCGRSIEEEQCLREGGMEVEHIIPKSVLYDDSYGNKTCACRRCNKEKGNRTALEYIRAKGREAEYMKRINDLLKEKKISYSKHQRLRWLKEDIPSDFLERQLRLTQYISRQAMAILQQGIRRVSASEGGVTARLRSLWGYGKILHTLNLDRYDSMGETERVSREGEATEELHITNWSKRMDHRHHAIDALVVACTRQSYIQRLNRLSSEFGREDKKKEDQEAQEQQATETGRLSNLERWLTQRPHFSVRTVSDKVAEILISYRPGQRVVTRGRNIYRKKMADGREVSCVQRGVLVPRGELMEASFYGKILSQGRVRIVKRYPLHDLKGEVVDPHLRELITTYNQELKSREKGAPIPPLCLDKDKKQEVRSVRCYAKTLSLDKAIPMCFDEKGEPTAFVKSASNHHLALYRTPKGKLVESIVTFWDAVDRARYGIPLVITHPREVMEQVLQRGDIPEQVLSLLPPSDWVFVDSLQQDEMVVIGLSDEELQRALEAQNYRKISEHLYRVQKMSSSYYVFRYHLETSVADDKNTSGRIPKFHRVQSLKAYEERNIRKVRVDLLGRISLL

SEQ ID NO: 614 - protein, 1422 aa, Prevotella denticola
MTQKVLGLDLGTNSIGSSVRNLDLSDDLKGQLEFFSSDIFRSSVNKESNGREYSLAAQRSAHSRSRGLNEARRRKLWATLDLLIKYGFCPMSPESLMRWRTYDKQRGLFREYPIDDKNFNAWILLDFDGDGKPDYSSPYQLRRELVIRQFDFDQPIERYKLGRALYHIAQHRGFKSSKGETLSQQETNSKQSLTDDTADVAGEMKASEEKLSKGLSTYMKENNLLTVGAAFAQLEDEGVRVRNNNDYRAIRSQFQREIETIFKFQQGLSVENELYERLVSEKKNIGTIFYKRPLRSQRGNVGKCTLERTKPRCAIGHPLFEKFRAWTLINNIKVRMSEEEQAEQLPMKLRFELYNDCFLAFVRAEFKFEDIRKYLEKRLGVHFSYNDKTINYKDSTSVAGCPITARFRKLLGEDWESFHVDGQKQRQAHGKNNASFHTVSYSTNDIWHFCYDAEEPEAVLSFAQDNLKWEKKKAEELVRIWSAIPQGYAMLSQKAIRNINKMLILGLKYSDAVLLAKVPEIVEITDGEILSVTEDYHRVEAQVGYEKQINNIVNALIAKYKSASEEYRFADHNYEYQLDKSDEKDIIKQIESNIGTRKWSLLDADEQTDILQKVRDKYQNFFRSHERKFVESPKLGECFEEYLMKKFPMVEGERWKKLYHPSQIAIYRPVPANKDRSALRLGNPDIGAIKNPTVLRVLNTLRKRVNQLLDDGIISPDETRVVVETARELNDANRKWALDTYNRIRHDENEKIKKILAEFYPKRDNISTVDIDKARYVIDQREMDYFTEAKTYHKDIKKYKLWLEQGGQCMYTGRTINLSNLFDPNSFDVEHTIPESISFDSSDMNLTLCDAHYNRFIKKNHIPADLPNYDKSVVIDGKEYSPIKPRLQRWADRVERLNRNVEYWRGQARRAQNKDRKDQCMREMHLWKMELEYWTKKLERFTITEVTDEFKNSQLVDTRVITRHAVLYLKSIFPHVDVQRGDVTAKFRKILGIQSVDEKKDRSLHSHHAIDATTLTIIPGAAKRERMLELFAKIEEVNKMLSFSGNEDRTGLKQELDGLKNQLNKEVKACRIGHNVSEIGTFINDNIIINHHVKNQALTPVRRRLRKRGHIVGGMDNPRWQTGDALRGEIHKASYYGAITQYAKDKEGKVLMKEGRPQINPTIKFVIRRELKYKKSSTDSGFASWDDLGKAIVDKELFALMKGQFPEGTSFKDACEQGIYMIKKGKNGEVDTKLYRIRHIRCKTKQKNALKIKEQAYKSEKEYKRYFYAAVGDLYAMCCYTNGKTREFKIYSLYDISCHRKVGVEDIPEFITDKKGNRLMLDYKLHTGDMILLYKENPEELYDLDNVSLSKLLYKINGFENDGLRIRMVNHLVAKEAMGESVKDYAKLPDIIRCGVKTIKFLVMGENRDFVIKNGKISFNHR

SEQ ID NO: 615 - protein, 443 aa, Prevotella disiens
MELDYWKGKYNRFTMTEIPEGFSRRQGMGIGLISRYAGLYLKTIFHKKDNPQKSNVYIVKGSITAEFRRIWNIQDDYEKKCRDNHIHHCIDAIVVGCIGKREYDLMAQFYRDEEKYRWEKKKKPFFKKPWETFTQDMLSLKDEVLTVHFNPSNFTKKAHKKVFTPKGIFVAQGDCARVKLHKESYFGAIEQKGEIKYVMRKELSALKIEDIKNIVDAVVKEKVLAVVKKKGFKQAMAEPIYMNEDKRILIKKVRLFVSQTNPLIVKKHRDLSSKEYKQNYYVDNEGNLMIAMYEGVKKNGKIDREITVVNNLEAAKFFRQSQKNNAEKQLISHLSPKNGYPLKTVLTQKQLVLMYEDSPKEIKLRDTKNMVKRLYQVVEIEKDGRVKLKFHQEARSEGLNKNSAAFKIQDTPESLYRHTKSNLKVLVNGVDFKINILGEISLI

SEQ ID NO: 616 - protein, 1375 aa, Prevotella histicola
MKKILGLDLGTTSIGWALVYESENTDEKSSIVRLGVRVNPLSVDEKGNFEKGKAITTNADRQQTHGARINLQRYKLRRENLKDCLQKQGWIGTEALCEEGKTSTFETYMLRAKAAEEEISLHELCRVLFMMNKKRGYKSNRKANNKEDGKLFDGMTVAKKLYEEHLTPAEYSFQLLSSGKKFKQEYYRSDLKEEFDRIWNEQQKYYPEILTDDFKQQLQGKSKGNTSKIFLGKYGIYSADLKGLDRKLQPLKWRVEALKQQVDKEVLAFVISDLNGQIASTSGLLGAISDRSKELYFNKQTVGQYLWTSLKETPHVSIKNKPFYRQDYLDEFEKIWETQATYHKELTPELKQEIRDIIIFYQRPLKSKKGLISVCELEQRKVKVTIDGKEKEISIGPKVAPKSSPMFQEFRIWQNLNNILLIDKGNNSIHPLYEEEKNLLYEELSVKEKLSKAEALKVLNKNSKQWDLNYKEIEGNRTQAVLYDCYNRIIVMTGHEEYNFKKLKASEIRSYVKTTFTGLGFNTDILEFDSSLTGHELEKQPMYQLWHLLYSYESDNSRTGNDALLRKLETAFGFPKEYAAVLSDVVFEDSYGNLSVKAMRKILPHLQAGLNYSQACEEAGYKHSRRSLTKNELDQKEYKEKLELLPKNSLHNPVVEKILNQMINVINAVIDEYGKPDEIRIELARELKIGAAERENMTRSINQGNAENKRIREILEKEFALSYISRNDIIKYKLYEELKSNGFKTLYSDTYISKDKLFSKDFDIEHIIPKARLFDDSLSNKTIEARDVNIAKSNKTAFDFISEKYDQQGIEAYKKKLDILLQDGSISKAKYNRLLMKEADIPSGFIDRDLRDTQYIAKKAYEILSDLVRNVTPTTGAVTSRLREDWQLVDVMKELNFEKYQKLGLVEVIEDRDGRKIKRIKDWTKRNDHRHHAMDALTIAFTKPSYIQYLNNLNARSDKNSSIYGIENKELHREDNKLRFNAPLPINEFRAEARRHLKSILVSVKAKNKVMTQNVNVIKTKHGVIKKVQLTPRGELHNATFYGTKKRPIIKMVKVGAALDEVTIKKVSSSFIREALLDRLHEYNGDAKKAFTGRNSIDKNPIYIDEEHKKTVPALVKTIEWEMYHPTRKLISPDLKIDKVIDKGIREILKTRLAKFNGDAQKAFSNLDENPIYKDEAKKITLKRVSLEGVSSVIPLHTLKDREGKLVVGKDGKPVLGDYVQTSNNHHIAFYMDENGNLQDNVVSFFEAAERKSQGVPVIDKNYNHDKGWNFLFTMKQNEYFVFPNEVTGFNPSEVDLMDEANYSIISPNLYRVQKMSKASGRDYWFRHHLEAMLNDDPKLRNSMFKRITSLKALEGIVKVRINCIGKIVAVGEYD

SEQ ID NO: 617 - protein, 1380 aa, Prevotella intermedia
MKRILGLDLGTTSIGWALVNEAENNNEASSIVRLGVRVNPLTVDEKSNFEKGKAITTNADRQLRHGARINLQRYKLRRQNLHDCLQKQGWLGTEAMYEEGKASTFETYKLRAKAAEEEISLHEFARVLFMLNKKRGYKSNRKANNKEDGQLFDGMTIAKKLYEEHLTPAEYSLQLLNKGKKFTQGYYRSDLNAELERIWDEQKKYYPEILTDEFKQQLEGKTKTNTSKIFLAKYGIYSADLKGLDRKFQPLKWRVEALQQQVDKEVLAFVISDLKGQIANTSGLLGAISDRSKELYFNKQTVGQYLWASLEENPHISIKNKPFYRQDYLDEFEKIWETQAAFHKQLTPELKQEIRDIIIFYQRPLKSKKSLISVCELEQRKVKATIDGKEKEITIGPKVAPKSSPVFQEFRIWQNLNNVLLIDNDTNEKRPLDEVERNLLYKELSIKAKLSKTEALKILNKKGKQWDLNYRELEGNRTQAILFDCYNRIITLTGHEECDFKKIKASEIRHYVSTIFKNLGFSTEILDFDPSLKKHELEKQPMYQLWHLLYSYESDNSRTGNESLLRKLETTFGFPEEYATVLCDVVFEEDYGNLSVKAMREILPYLQAGNDYSQACAYAGYNHSRHSLTKEELDQKVYKERLELLPKNSLRNPVVEKILNQMINVINAIIDEYGKPDEIRIEMARELKSSAADRKKTTHAISQGNAENQRIREILEKEFSLSYISRNDIIKYKLYEELEPNYYKTLYSDTYITKDKLFSKDFDIEHIIPKARLFDDSFSNKTLEARNINLEKSNKTAFDFIKEKYGEDGAEAYKKKLDMLLENDAISRPKYNNLLRAEADIPSDFINRDLRNTQYIAKKACEILGELVKTVTPTTGKITNRLREDWQLVDVMKELNFEKYEKLGLTEIVEDRDGRKIKRIKDWTKRNDHRHHAMDALAIAFTKPSFIQYLNNLNARSNKGDSIYAIENKELHYEEGKLRFNAPIPVNEFRAEAKRHLSAILVSIKAKNKVMTQNVNKIKTKHGIIKKIQLTPRGPLHNETIYGTKMRPIIKMVKVGAALDEATINKVSSPAIREALLKRLNEYSGNAKKAFTGKNTLEKNPIYLNAGRTKTVPSLVKTVEWESFHPTRKLIDKDLNVDKVVDKGIREILKARLEEFNGDAKKAFSNLEENPIYLDEAKKIALKRVSIEGVLSAIPLHTLKNQAGKPITGKDGKPVLGNYVQTSNNHHIAFYYDEDGNLQDNAVSFFEAAERKSQGIPVIDKDYNRDKGWRFLFTMKQNEYFVFPNEATGFIPSEVDLTDEANYGIISPNLYRVQKVSRIDKGTSASRDYWFRHHLETILNDDAKLKNLAFKRIRGLLELKDIIKVRINSTGKIVAVGEYD

SEQ ID NO: 618 - protein, 129 aa, Prevotella multiformis
MQKGGTGCKINRQTVGNVEVNVLNLRLYDRTDDREVTAGYLPTKEDYVRLFVYLNDRKEINQDTLLKDYFRLKKVKCGNEKEFAIRWNYIEDKEKKYPCNETRHELLAALDRAGMEHGWLDDSGTSARW

SEQ ID NO: 619 - protein, 535 aa, Prevotella multiformis
MVKGLLSNIVRTAEEREETSKFVISCTGRITDRLKQDWGLNDVWNSLVYTRFKRLNELTETEAFGHWQDKDRRVFQTSVPLELQRGFSKKRIDHRHHAMDALVIACASRNIIGYLNNESAESPEKREDLRRKLCDKNHIIRKPWESFTQDARAALEDIVVSFKNYVRIINKATNYYERYDADGRKTKAEQKGGEMWAVRKPMHEATYYGKVNLRRKERVSLKAALEDIPSICNRDLRDYINGLVEKHFNKEQVLAQFRSVGNRWNKQHIDKVDVWRFSDGKEEMVATRKPLDTSFDAKRIEAVTDTGIQRILSNYLEAKGGDPKIAFTPEGIADMNQHITAYNNGKQHKPILKVRVSTKLGKKYPVGQTGCKAGQFVVAEAGTNLYFAVYEDGEGNRSYDTIPLNEAVECLKQGLPPVPETREKGDRLKFYLSPNDLVYVPAGDEENEIDRERIYKFVDSSGTTANFIPHRTAGLIYNVDKKLAEALCNGSIIQNEYGVGSQQSKNQKALTGEMVKAVCWKLEVDRLGNILRIIK

SEQ ID NO: 620 - protein, 1380 aa, Prevotella nigrescens
MKRILGLDLGTTSIGWALVNEAESNNEASSIVRLGVRVNPLTVDEKSNFEKGKAITTNADRQLRHGARINLQRYKLRRQNLHDCLQKQGWLGTEAMYEEGKASTFETYKLRAKAAEEEISLHEFARVLFMLNKKRGYKSNRKANNKEDGQLFDGMTIAKKLYEEHLTPAEYSLQLLNKGKKFTQGYYRSDLNAELERIWDEQKKYYPEILTDEFKQQLEGKTKTNTSKIFLAKYGIYSADLKGLDRKLQPLKWRVEALKQQVDKEVLAFVISDLKGQIANTSGLLGAISDRSKELYFNKQTVGQYLWASLEENPHISIKNKPFYRQDYLDEFEKIWETQATFHKQLTPELKQEIRDIIIFYQRPLKSKKSLISVCELEQRKVKATIDGKEKEITIGPKVAPKSSPVFQEFRIWQNLNNVLLIDNDTNEKRPLDEDERYLLYKELSIKAKLSKTEALKILNKKGKQWDLNYKELEGNRTQAILFDCYNRIITLTGHEECDFKKIKASEIRHYVSTIFKNLGFSTEILDFDPSLEKHELEKQPMYQLWHLLYSYESDNSRTGNESLLRKLETTFGFPEEYATVLCDVVFEEDYGNLSVKAMRKILPYLQAGNDYSQACAYAGYNHSRHSLTKEELDQKVYKERLELLPKNSLRNPVVEKILNQMINVINAIIDEYGKPDEIRIEMARELKSSAADRKKTTHAINQGNDENQCIREILEKEFALSYISRNDIIKYKLYEELKPNGFKTLYSDTYIPKDKLFSKDFDIEHIIPKARLFDDSYSNKTLEARDINLAKSNKTAFDFVKEKYGEQGAEAYKKKLDMLLGNNVISKPKYNKLLMTEADIPSDFINRDLRNTQYIARKACEILGELVRTVTPTTGKITNRLREDWQLVDVMKELNFEKYEKLGLTEIVEDRDGRKIKRIKDWTKRNDHRHHAMDALAIAFTKPSYIQYLNNLNARSNKGDSIYAIENKELHYEEGKLRFNAPIPVNVFRAEAKRHLSAILVSIKAKNKVMTQNVNKIKTKHGIIKKIQLTPRGPLHNETIYGTKMRPIIKKVKVGAALDEATINKVSSPAIREVLLKRLNEYSGNAKKAFTGKNTLDKNPIYLNAERTKTVPASVKTVEWENYHPIRKPITPDLKVDKVIDKGIGEILKARLEEFNGDAKKAFSNLEENPIYLDQTKKIALKRVSIEGVLSTIPLHTLKNQAGKPIMGKDGKPVLGNYVQTSNNHHIAFYYDEDGNLQDNAVSFFEAAERKSQGISVIDKDYNRDKGWRFLFTMKQNEYFVFPNEATGFIPSEVDLTDEANYGIISPNLYRVQKMSRIEKGTSVSRDYWFRHHLETILNDDSRLKNSAFKRINSLKPLEGIIKVRINSIGKIVAVGEYD

SEQ ID NO: 621 - protein, 1506 aa, Prevotella nigrescens
MKTILGLDLGPNSIGWAKVEVDDEGNYLRNIKLGSRIIPMTQDMLGDFDKGVKVSQTAIRTDFRGNRRLIERHLLRRERLHRVLHALKFLPKHYEDAIGWDRNEPATYGKFVNNSEPKLAWERQEDGSMRFLFMESFNEMVADFAQNQPSLVSDGKKIPLDWTIYYLRKKALTRPIKKEELAWILLNFNQKRGYYQLRGEEEEDNLTKRKEYYKLKVVGVEADGAPKGGKTWYNIHLENGWTARCQSKIPLDDWVGKVKEYIVTTEYEDDGKTPKCDKEGKVKRSFKSPEKDDWQLIKTRTEKFIDDSNKTVGAFIYDYLLEKPFDKIRGKYIRTIERKYYKNELREILREQTKYHEGLHSLEALKICAEELYKNNQQHQEYLLKKDMTFLLLNDLIFYQRPLKSKKSLIADCPYEVYKYDDKLTGKKGQKKIKCIAKSNPYYQEFRLWQFIANLRLFSVTDGKEVTAEYLKTEEDYVRLFSFLNDRKDIKQETFLRSFLKLKKESIGSEKIYPIRWNYIEDANKSYPCNATRHELLLAFDRADIPRELLDVEEREYRLWHLLYSIEAKEETESALRKLKANKAFGDLNIDDAFVNSFLKIKPFEKEYGAYSEKAIKKLLAVMRRGSLWKEADICEATKQNIAKILQNDIDEKLKKKIEAAVSSFNKLSDFQGLPTWLACYVVYGRHSEAAQIQCWQSPEDLKTYINKFKQHSLRNPIVEQCLLETLRTVYDIWKDAGQIDEIHIELGRNMKSTAEQRARKTKDILRNENTNLRIKNLLVELKNDDKIENVRPYSPSQQEILRIYEEGALQELSKEDEMFEDISKISKMAQPSPTELSRYKLWLEQKYRSPYTGRVIPLSKLFTTAYQIEHIIPQSRYFDDSFNNKVICESEVNSLKDNMLGYEFIKECGGRIVHCTLLGDVKIFTKEEYKDFVTKHYIDNTYKRDKLLLEDIPQEFSARQLNDSRYISKMVQTVLSNIVRAENEQEATSKFVVSCNGAITNRLKKDWGLNDVWSSIVCPRFKRLNEITKTNAFGHWEDKAGKHVFQTTVPLELQRGFSKKRIDHRHHAMDALVIACASRNIVNYLNNESANSPEKREDLRKKLCDEKRKIRKPWKTFTQDAREALSDVVVSFKNYVRVINKATNYYEHYSSSGNKVMISQKGNDMWAIRKPLHKESVFGRVNLCRKVIVSLKKALENIPAICDKTLRDYINALVEKHFNTRQLLAHFKSINYRLNRQCVEKVEVWQFSDEKIEMVARRKSLDTSFDDKQISSITDTGIQKILLNYLQTKDGNAEIAFTPEGIEEMNKNISLYNDGKAHQPILKVRVATPKGMKYPVGQTGNKATKFVVAEKGTNLYFAIYENELGVRSYDTIPLNIVVERLKEGLSPVPQANEADIPLKFYLSPNDLVYVPTKENEDELCRDRIYKFVDSSGTTANFVPHTSANTIYNVDKEYAEKCCNGAVFLNEYGLGSPQSKNQRALTGEMIKEICWKLKVDRLGNIIKVIK

SEQ ID NO: 622 - protein, 774 aa, Prevotella oulorum
MEQCILETLRTVYDIWKEAGQIDEIHVELGREMKQTAEQRAHLTEKVLRNENTNLRIKSLLMELKNDADMKDVRPYSPMQQEILRIYEEGALQTLSKDDAAFTEIMKISKMAQPSASELQRYRLWLEQKYRSPYTGKPISLSKLFTSAYQIEHIIPKKRYFDDSFSNKVICEAEVNGKKDSMLAYEFIKDCGGDVIHCTTLGDVTILSEAEYKALVTELYANNKSKKDKLLMEDIPQDFINRQLNDSRYISRVVMTLLSNIVRIEGEEEATSKFVIPCSGGITDKLKKDWGLNDVWNNIVYPRFERLNALTNTSDFGQWENKEGKRVFQTSVPLELQRGYQKKRIDHRHHAMDALVIACASRKIINYLNNQEANDPTKQENARKQLCIKSRIIRKPWETFTQDAYKALDNIVVSFKNYVRVINKATNYYERYNADGKKAVDEQKGEAMWAIRKPMHKDTVFGHVNLRRKAVVKLKDALENIPAICDKTLRHYIQDLQKKHFNTKQLLAHFKSINYRLNKQAVDKVEVWQYSDDKEQLAATRKPLGPSFDAKCIAAITDTGIQKILLNYLQAKGGDPAIAFTPEGIAEMNQNIAVYNGGKQHQPILKVRIAKPMGKKFPIGQTGNKAFQYVIAEEGTNLYFAIYEDEEGNRTYDTIALREVVERLKQGLTPVPEKNEKGVALKFHLSPNDLVYVPTADELLSKVCSLDKNRIYKMVSATKSECLFIPHSVAKTIYDKVEFEALNKMGRALTGEMIKSVCWKIEVDRLGHIVNIIK

SEQ ID NO: 623 - protein, 691 aa, Prevotella oulorum
MKTILGLDLGTNSIGWAKVIVDDNENYLRDIQLGSRIIPMSQDVLGKFDKGVTESQTAIRTSFRGVRRLRERTLQRRERLHRVLHTLHYLPPHYDSAIGWDRKTPTTYGKFLNHGEPKLAWERREDGTMQFLFMDAFHEMIADFAKYQPALVADGKKVPLDWTIYYLRKKALTQPIKKEELAWILLNFNQKRGYYQLRGEEDEENAAKHEEYHELKVVGVEVDEAGKGDNTWYNVKLENGWTYHRQSKIPLDDWVGKVRAFIVTTEYEKDGTTPKKDKEGNVKRSFRSPDEKDWGLRKKQTEHSLEASGTPVGAFIYDHLLKEPSDKIRGKFIHTIERKYYKQELAAILREQSKHHEKLCSKDMLKACIEELYPNNPLHRESLLKKDMPYLLIEDLIFYQRPLKSKKSLIAECPYEAYSYVDKETGEMKRQGIKCIAKSNPYYQEFRLWQLIANLRLRNRSDERDVTAEYLPHQEDYVRLFTYLNDRKEINQETLLKDFFKLKKVTIGGEKVFPIRWDYIEDKEKKYPCNATRHELLLALDRAGIEHDWLNDRDLAYRLWHLLYSVDSKDETERALRKLKDDDAFVESFLKIKPFEKEYGAYSEKAIKKLLPVMRRGSLWNEADLCPSTKERIANILQGTIDEKLKKKIGAFISSCQQVSDFQGLPEWLACYVVYGRHSEATDIQRWETPE

SEQ ID NO: 624 - protein, 242 aa, Prevotella saccharolytica
MKLVLGLDLGVGSVGWALIFITDSGEPIKILALGERIVSMDSNNSNEFSAGATCTLNQKKTKAKSVRKGYSRYVQRRDALTAELRHIGMMPDETLIKLPVLDLWQLRANAATEGKKLSLAEIGRVLYHINQRRGYKHGKSDVSSDNKQKGYVKAVNERYCMIQERQQTIGQYFALKLKETAVTTEKGTFYTFRIKDQVFPREAYEEEFVVAYSTKVLKFKQITTLLNVVICLMMLLLIVQRY

SEQ ID NO: 625 - protein, 1174 aa, Prevotella sp.
MEFHPELCDAELLKACAEELYRNNEAHRAQLLAKDFKHLLVEDVLFYQRPLKSKKSLIANCPYETRQYINKETGEIKDVNVKCIAKSNPYFQEFRLWQWISNLRLLRQADGQDVTAAYIKGNEDKERLFDLLNNQGEIKQEHILRDFLKLKKPKGGEFPLRWNYVDDKIYPANETRHAINKAIKGMAVDKEEKETLGQLLDQPAVAYMLWNLLYSITDRNELARALRRFALTHGVSSVDAFVESFLKVKPFKKEYGAYSEKATKKLLQVMRLGKYWCGDELPEPAKRTKGNKQAVYDEMAHRGICKQTLQNISNIIEENIDERLMGALLNPERPLTELSHFQGLSVSDACYVVYGRHSEVAEIVKWKDADELNTFINNFKQHSMRNPIVEQCVLETLRTVRDVWEQEGQIDEIHVELGRNMKRTAEQRARDTQAIQRNENTNMRISLLLTELKNDPSISDVRPYSPSQRELLKIYEEGALENLTNQDEDIAKISRLAQPSASELRRYKLWLDQKYVSPYTGRPIPLAKLFTPAYEIEHIIPQSRYFDNSFSNKVICEAEVNKLKDNLLGMEFIKKFGGKTKGILDEEAYKLHVTTNYAHNPAKRSKLLMEDLPTDFNSRQLNDTRYISKTVMALLSNVVREEGERETRSKHVVVCTGGVTDTLKKDWGLHDVWHNLVYPRFIRLNNLTGSQNFGYWRYLNEENSKKGEDSKKVFQITLPPECQRGFVKKRIDHRHHAMDALVIACASANIVNYLNNQSAANPHIHENLQRLLCDRKREIRKPWPTFTQDAQAALKDLVVSFKNTVRVVNKASNTYLRYDKDGKKKRFKQEGEGLKAIRKPMHKETYYGEVNLIRKEMVPLKRALDDVNAIVDKELRASIKGLLRDGFNPQQVLANFKAKDFKFDKRDIKKVEVYVSSEKSTPMVATRKSLDTSFNAKRIADITDTGIQKILLNYLKANDNSPEQAFTPEGIAYLNEHIAEYNDGKPHQPILKVRVSEVKGAKFAVGQTGSKKDKFVEAQSGTNLYFAIYEDKEGKRHFETIALKVAAERLKDKQMPVPEINDAGLPLKFYLSPNDLVYVPTDEDRATAHPSIDKMRIYKMVSATDRQCFFLPFTVASVISNKVEFEALNKMERVLDASEYSSAYDSSHVNKVMVKNVCWKLEVDRLGNITKIVR

SEQ ID NO: 626 - protein, 992 aa, Prevotella sp.
MITRILGLDTGTNSLAWAVVDRDANGNYTLVKRGDVIFTEGVKIEKGIESSKAAERTAHKALRVHYSRRRLHKIDTLKVLVELNLCPCLSDEQLSQWKAKKTYPLTDDFMLWQRSGSAEENNPYYCRHRCLTQKLDLTDQSQRFLLGRAFYHLAQRRGFLSNRLDTSADSDESGKVKSGIAQLSVEMEKAGCEFLGEYFYQLYKQHGNTIKLRSRYTDREEHYKKEFLAICEKQELDPKWVEALQRAIYFQRPLKSQRKGVGKCTFEPKKPRCAESHPDYEAFRMLCFLNNVKIQTPNDTSLRPLNEDEREKIWPIFFRKSKPNFDFEDIAKALAGKNNYAWYKDAGEKPFKFNYRMQQGVSGCPVTAQLIDIFGSDWQTAIAETYTAVEKKNGTKTIDEMADDVWNVLYSFSSKDKLKAFATEKLQLDEASATKFANAKLPHGFASLSLKAIRNILPFLRQGFIYAHAVHLAKIPDIVTKAVWNDADKREMILSGLMEIIENYNPKDRGVEGTIDFCIKSHLQDVIDLRPGAADALYHPSMIETYPDAKLNKMGVFQLGSPRTNAIRNPMAMRSLHILRSVVNQLLRDGIIDRDTEVHVEYARELNDANKRKAIADYQREQEKKRKQYRDDIIALYKSECHKEIEPTDTDILKFQLWEEQNHLCLYTGTQIGICDFLGDNPKFDIEHTVPRSVGGDSTQMNLTLCDATFNRQVKGAQLPSQLSNHADILVRIDHWKSKCEDLRKQLDKIRTYGGMEKNMKDRLIQKRHRLKMDLDYWQGKYSRFTMTEVPEGFSRRQGAGIGLVSKYAGLFLKSLFHNEQNPNKSNVYVVKGVTTAEFRRMWGLQGEYEKKSRLNHCHHCIDAITIACIGKAEYDKMAQYYHDEELFQWRGTTTKPHFNKPWPTFTEDVLAIEQSLLVKHLTKDNMPKQAKKRVRTATGKYLAQGDTARGSLHKDTYYGAIEQNGEIRYVLRKPLNKFENEAELEKIVDQA

SEQ ID NO: 627 - protein, 1375 aa, Prevotella sp.
MKKILGLDLGTTSIGWALVNESENKDEQSSIVRLGVRVIPLTVDEKGNFEKGKAITTNADRQQVHAARINLQRYKLRRENLRDCLQKQGWIGSEPMCEDGKSSTFETYKLRAKAAVEEVSLHEFARVLFMLNKKRGYKSNRKANDKEEGKLFDGMTIAKKLYEEHLTPAEYSLQLLNTGRKFTPEYYRSDLIEEFEKIWNEQQKYYPEILTDEFKQQLEGKAKSNTSKLFLGKYGIYSADTKGLDRRLQPLKWRVEAMKQQVDKDVLAFVISDLKGQIANTSGLLGAISDRSKELYFSKQTIGQYLWASLQENPHISIKNQPFYRQDYLDEFEKIWETQATYHKELTSELKQEIRDIIIFYQRPLKSKKNLIAVCELEQRKVKVTVDGKEKEITIGPKIAPKSSPMFQEFRIWQNLNNILLLDHETNSKRPLYEEERNLLYEELSVKEKLSKTEALKVLGKKSKQWDLNYKELEGNRTQAVLYDCYNRIIVMSGHEECNFKKLKASDIRHYVKMIFKNLAFNTDILCFDSSLKGHELERQPMCQLWHLLYSYEGDNSRTGNDALLRKLETSFGFPKEYAAVLADVIFEDSYGNLSVKAMRNILPHLQAGKDYSQACEEAGYKHSRRSLTKEELNQKVYKEKLELLPKNSLHNPVVEKILNQMVNVINAVIEEYGKPDEIRIELARDLKIGAAERENMTRSINQGNAENKRIREILEKEFALSYLSRNDIIKYKLYEELKSNGFKTLYSDTYISKDKLFSKDFDIEHIIPKARLFDDSLSNKTIEARDVNIAKSNKTAFDFILERYGEQGVKTYKTKLLRLLEDGAISNKKYNNLLKTEADIPSGFIDRDLRNTQYIAKKAYEILSELVKIVTPTTGSVTNRLREDWQLVDVMKELNFEKYQKLGLADVIEDRDGRKVKRIKDWTKRNDHRHHAMDALTIAFTKPSYIQYLNNLNARSDKSSSIYGIEVKELHREEGKFRFNAPLPINEFRAEAKRHLKSVLVSIKAKKKVMTQNVNKIKTKHGIIKKVQLTPRGELHNATYYGTKKRPLVRMVKVGAALDEATIKRVCSPAIRAALLKRLNAYNGDAKEAFTGRNSIDKNPIYLDIEQTKLVPVLVKTIEWGMYHPIRKRITPDLKIDKVIDKGIREKLKARLAEFNGDAQKAFSNLDENPIYMDEAKRITLKRVSIEGVLSAIPLHTLKDKAGKPVIGSDGKPVFGDYVQTSNNHHIAFYIDDKGNLQDNPVSFFEAAERKSQGVPVIDRRYNCDKGWHFVFTMKQNEYFVFPNEATGFIPSEVDLLDEANYCIISPNLYRVQKLSKASGRDYWFRHHLETMLNDDLRLKNSTFKRIQSLKGLEDIVKVRINSIGKIVAVGKYD

SEQ ID NO: 628 - protein, 1483 aa, Prevotella sp.
MKTILGLDLGTNSIGWAKVSVDDYGNYLHDIKLGSRIIPMSQDVLGNFDSGVTVSQTAQRTEFRSKRRLVQRNLQRRERLHRVLHVLDFLPAHYDAAIGWDRTEAVTYGKFLNHAEPKLAWEELGNGKRRFLFMDSFHEMVADFARCQPALVADGKKIPLDWTIYYLRKKALTQAITKEELAWILLNFNQKRGYYQLRGEEEEENPTKQEEYYELKVVSVEATDSRKGNDTWYNVHLENGWIYRRSSKISLDDWVGKVKQFIVTTEYEKDGTTLKTDKEGNVKRSFRAPNENDWGLRKKRTETLLEMSGKTVGAFIYDHLLQEPADKIRGNFIRTIERHYYKAELEAILAEQCKYHIELRDKEMLEACARELYLNNLPHQRSLMKKDMTYLLLYDLIFYQRPLKSKKALIANCPYEYYEYVDKETGEIKRQNIKCIAKSNPYFQEFRLWQFVLNLRLFDRVEDKEVTANYLPTADDHARLFTYLNDRKEINQETLLKDYFKLKKVKIGNEKEYPIRWNYIEDKEKKYPCNETRYELLMALDRAGIEHKWLDDNNLEYRLWHLLYSVEVKSESETALRKLKNDDAFVNSFLKVKPFKKEYGAYSEKAIKRLLAVMRKGFLWNEQDICDETRKRIEIIIKGDVDEKVKERMGHAAYSFDRVSDFQGLPEWLACYVVYGRHSEAMDIQRWDSPERLMAYINNFKQYSLRNPIVEQCILETLRTVHDIWKETGQIDEIHVELGREMKSTSEERARRTQNVLRNENTNLRIKSLLIELKNDTDICNVHPYSPMQQEILRIYEEGALQELNREDEDFEEISKISQMSQPSGKELNRYKLWLEQKYRSPYTGKAISLAKLFTPAYQIEHVIPQSRYFDDSFTNKVICEAEVNTLKSNLLGYEFIKKHGGEIIHCTTLGDVRIFSESEYKAFVMDHYANNKSKKDKLLMEDIPQEFLSRQMNDSRYISKVVKTLLSNIVRMADESEATSKSVIVCTGGVTDRLKKDWGLNDVWNSIVYSRFERLNRLTGTEAFGHWENKDGKRVFQTSMPLELQRGFRKKRIDHRHHAMDALVIACASRNIVNYLNNESANNPKKREDLRRQLCDKNRVIRKPWETFTQDAYNALENVVVSFKNYVRVINKATNRYEHYDENGKKRFVQQKGSELWAIRKPMHKETYYGHVNLRRKELVTLQKALDDIPSICDKKLRDYISALVEKHFNKRQLLAHFKSTDYYWQKQYVNKVYVWTFSDDIKPLVATRKLLDTSFDAKRIGTITDTGIQKILRNYLEAKGGNATLAFTPEGIVEMNQNISKYNDGKPHQPILKVRITEPMGAKYRVGQTENKMAKYVEAQSGTNLYFAIYEDSEGKRSYTTVPLDEVAERLKQRLSPVPEKDENDVPLKFYLSPNDLVYVPTEEELQLRECKLNKDRIYKMVSSTGSECHFIPYYVANVIYNKVEFEAKNKIGRALTGEMIKAVCWKLEIDRLGNILKVIK

SEQ ID NO: 629 - protein, 593 aa, Prevotella sp.
MNTRILGLDTGTNSLAWAVVDRDAKGNYTLVRRGDVIFTEGVNVDGQPVPSKAAVKSKYKSLRVQYARRRLRKIDTLKVLVSLDLCPYLSDQQLSQWKAKKTYPLTDDFMLWQRSGSAEENNPYYCRYRCLTQKLDLTDQSQRFLLGRAFYHLAQRRGFLSNRLDTTSDSAESGKVKSGIAQLSVEMEKAGCTFLGEYFYQLYKQHGNTVRLRSRYTDREEHYIKEFLAICEKQELDAQWVEKLQRALYFQRPLKSQRKGVGKCTFEPKKPRCAESHPDYEAFRMLCILNNIKIKTPKDVSLRPLNAEEREKVWPLFFRKSKPNFDFEDIAKALAGKNNYAWYKDAGEKPFRFNYRMHQGVSGCPVTAQLIDIFGSDWKAGIAETYTAVGKKNGTKTIDEMADDVWNVLYSFSSKDKLKAFATDKLQLDEARATKFANAKLPHGFAALSLKAIRNILPFLRQGFIYAHAVLLAKIPDIVTAAVWDDADKREQILSGLLEVIENYNPDDRGIEGTIDFCIKSHLQDVVDLRPGAADALYHPSMIEAYPDAKLNKMGVFQLGSPRTNAIRNPMAMRSLHILRSVVNLLLRDGMLS

SEQ ID NO: 630 - protein, 1424 aa, Prevotella sp.
MTQKVLGLDLGTNSIGSAVRNLDLSDDLQWQLEFFSSDIFRSSVNKESNGREYSLAAQRSAHRRSRGLNEVRRRRLWATLNLLIKHGFCPMSSESLMRWCTYDKRKGLFREYPIDDKDFNAWILLDFNGDGRPDYSSPYQLRRELVTRQFDFEQPIERYKLGRALYHIAQHRGFKSSKGETLSQQETNSKPSSTDEIPDVAGAMKASEEKLSKGLSTYMKEHNLLTVGAAFAQLEDEGVRVRNNNDYRAIRSQFQHEIETIFKFQQGLSVESELYERLISEKKNVGTIFYKRPLRSQRGNVGKCTLERSKPRCAIGHPLFEKFRAWTLINNIKVRMSVDTLDEQLPMKLRLDLYNECFLAFVRTEFKFEDIRKYLEKRLGIHFSYNDKTINYKDSTSVAGCPITARFRKMLGEEWESFRVEGQKERQAHSKNNISFHRVSYSIEDIWHFCYDAEEPEAVLAFAQETLRLERKKAEELVRIWSAMPQGYAMLSQKAIRNINKILMLGLKYSDAVILAKVPELVDVSDEELLSIAKDYYLVEAQVNYDKRINSIVNGLIAKYKSVSEEYRFADHNYEYLLDESDEKDIIRQIENSLGARRWSLMDANEQTDILQKVRDRYQDFFRSHERKFVESPKLGESFENYLTKKFPMVEREQWKKLYHPSQITIYRPVSVGKDRSVLRLGNPDIGAIKNPTVLRVLNTLRRRVNQLLDDGVISPDETRVVVETARELNDANRKWALDTYNRIRHDENEKIKKILEEFYPKRDGISTDDIDKARYVIDQREVDYFTGSKTYNKDIKKYKFWLEQGGQCMYTGRTINLSNLFDPNAFDIEHTIPESLSFDSSDMNLTLCDAHYNRFIKKNHIPTDMPNYDKAITIDGKEYPAITSQLQRWVERVERLNRNVEYWKGQARRAQNKDRKDQCMREMHLWKMELEYWKKKLERFTVTEVTDGFKNSQLVDTRVITRHAVLYLKSIFPHVDVQRGDVTAKFRKILGIQSVDEKKDRSLHSHHAIDATTLTIIPVSAKRDRMLELFAKIEEINKMLSFSGSEDRTGLIQELEGLKNKLQMEVKVCRIGHNVSEIGTFINDNIIVNHHIKNQALTPVRRRLRKKGYIVGGVDNPRWQTGDALRGEIHKASYYGAITQFAKDDEGKVLMKEGRPQVNPTIKFVIRRELKYKKSAADSGFASWDDLGKAIVDKELFALMKGQFPAETSFKDACEQGIYMIKKGKNGMPDIKLHHIRHVRCEAPQSGLKIKEQTYKSEKEYKRYFYAAVGDLYAMCCYTNGKIREFRIYSLYDVSCHRKSDIEDIPEFITDKKGNRLMLDYKLRTGDMILLYKDNPAELYDLDNVNLSRRLYKINRFESQSNLVLMTHHLSTSKERGRSLGKTVDYQNLPESIRSSVKSLNFLIMGENRDFVIKNGKIIFNHR

SEQ ID NO: 631 - protein, 241 aa, Prevotella sp.
QAVKEKIKEAIAGKNFKTAIAEPIFMNKEKGIRINKVRYYVKAQERLKIRQQRDLSSKEYKQFFCVENESNYLLAIYEGELKGKKERDFCVVNNLDSAACLKRSNKGKAAPLVPERSEERNLPLLAVLKRGTQVLFYENSPEEILFDNPQDLVRRLYKVTGINTKKDVKNGKTYLYGNIELRFHQNAQKKDDVKMQSGVYKNNEVLRQGIVLSHKQFKALVEGVDFEFNVLGEIKKKERHA

SEQ ID NO: 632 - protein, 1216 aa, Prevotella stercorea
MTKILGIDTGTNSLGWAIVDKTADNYNLLDKGVNIFQEGVKIEKGIESSKAAERTEHRATRVRYYRIKLRKIRLLRILSDNHLCPPLSQEELSTWRLKKVYPKNELFMQWQRTDDDTEKTPYAYRHKCIHEKLDLSDVTDRYILGRAFYHIIQRRGFLSNRKEQGGEDSGKVKEGISTLTHEMNEAGYEYLGDYFYALYNKGEKIRKHYTARNEHFLSEFKAICEKQDLEKELGSEVVRNIEKAIFDQRPLKSQKGQVGKCVFEKNKTKCPSSHPMYEEFRMLTFINNIKIKTPNDDVLRPLNTGEREKIMPLFFRKSKKQFDFEDITKKLAPKKMYGFYKKEEDAEMPFLFNYPMDTSVSGCPVTAALKDVFGDDWITAICETYTLGEGKSRFDIVNDIWHALYFYSDKDKLAEFAINRLQLSEDEAKIFSEISLPADYASLSLKAICKILPYLRRGLIYSHAVFLGNLCEVMPKYEWSIKEMRETIIDNIIMEMDKCDTKDKRTFEVCIKDYLKGQYNVSDNSLKKLYHPSMIETYPRVQYTNEHGVYQLGSPRIDSVRNPMAMRSMFRLRKLVNRLLVEGKIDQNTEVHIEFARELNDANKRNAIALFVKENQSANDEARKQIITLFKKETGTDIEPTDKDILKYVLWEEQNHICLYTGKQIRISDFIGANPKFDIEHTIPRSVGGDSTKMNLTLCDSRFNREVKKTKLPVELPNHDEIMERIKEWKKNYELLDIQIRKNKKLSKGATTKEQKDTIIRKRHLLELRRDYWRGKYERFTMESVPEGFSRRQGTDISVISKYARLYLKSLFNRVYTVKGIATSDFRKIWGIQDIYSKKERINHVHHCIDAIVIACIGLDEYNKLGAYYHDEENNKWYGMSKASFKKPWATFVEDIKKIQDEILVYHYTPDNMPKQGRRRIKIDGKKILCKGDAARGSLHNDTYYGAIENDGAVKYVKRIDLASLEEKDVKNIVDDTVRSIIEAAIKEKGFKDAMASTIWMNEEKRVPIKKVRCFTPSITKPLNIRKQRDVSIKEYKQQYHVANDSNYLLALYIGTDNKGKEKREFEIVNILQAAQYYRTSNDKEVVDRHIVPIKSEHDYPFAYTLKIGTMVLLYEKSPNEVWDATIKERNRRLYKVTGLSTMRMKGRNGEYAYATVKLIHNEEARPSKDIKAKNGEYEQGEEFRPAIIMLHTQLNALVQGYDFEINELGEIRRLR

SEQ ID NO: 633 - protein, 1487 aa, Prevotella timonensis; identical to SEQ ID NO: 144

SEQ ID NO: 634 - protein, 770 aa, Pseudoramibacter alactolyticus
MAKGYFASDEEIDFSGVDDGFKNTLSSHQKFKEIFDVEVLNDWQKSMSEKIIFWATVYGDSKKFLKERLEDAYGNELDQKQIKRILGLRFKDWGRLSEAFLNLEGKNSKTNQSQTIIEALWNGDGTNNFNLMELLSSQFTYRDTLKKRALKGEKTLTNITYEDLSDLYLSPSVRRMVWQTILIVKELRQVLGAGPAKIFIEMARDVTLKAGTRTTSRRQQLLDLYKNVQTESRNWVEEIETQEESRFRSKKIFLYYTQMGQCMYTGEPIVFKDLFNRNLYDIDHIYPRHFVKDDSLINNLVLVKKQANSHKSDTFPIENSIQQARRDFWKWLSEKGLISREKFNRLTRRTSFSDEELAGFISRQIVETRQGTKAVAQIFENALPDSEVVYVKAGNVSDFRHHFNLLKCREINDLHHAQDAYLNVVVGNVYHTKFTKNPINFIKGYRKDRKAYAYHMDQIFDHPVKRNDIIAWQTDKNQSIATVKKVMAKGTPLVTRMSYEEHGELSNQNICSAKAAQKAEGKGYLPIKNSERLSNTQRYGGYNKYAGSYFFLVEHTLKKNRVRTIETMPLFLRDTIKTSKDLLKYCCESLKLEAPSIRVMKIKMGSLLSVNGAFVYLTGRSGKKLITPNGFQLILPQKWQDYIRLLIKTKDSPDDVEGISGGKNIEFYDILVEKHTKTCLKNRPNPIGEKLREWRNDFIALDNQKQSDILLEILKLTTFDNSGADLRAIGGKNQSGVSTIGKKISSQKSVVLVHRSVTGIFEKQVDLLSI

SEQ ID NO: 635 - protein, 103 aa, Rhizobium etli
MSGEQLTREIGRSGVKASAVGLGTWAIGGWMWGGTDEAQSIAAIQASLDAGVTLIDTAPAYGLGRSEEIVGKALAGRRDKAVIATKCGLVWHTQKGNHFFDQD

SEQ ID NO: 636 - protein, 1059 aa, Rhodovulum sp.
MGIRFAFDLGTNSIGWAVWRTGPGVFGEDTAASLDGSGVLIFKDGRNPKDGQSLATMRRVPRQSRKRRDRFVLRRRDLLAALRKAGLFPVDVEEGRRLAATDPYHLRAKALDESLTPHEMGRVIFHLNQRRGFRSNRKADRQDREKGKIAEGSKRLAETLAATNCRTLGEFLWSRHRGTPRTRSPTRIRMEGEGAKALYAFYPTREMVRAEFERLWTAQSRFAPDLLTPERHEEIAGILFRQRDLAPPKIGCCTFEPSERRLPRALPSVEARGIYERLAHLRITTGPVSDRGLTRPERDVLASALLAGKSLTFKAVRKTLKILPHALVNFEEAGEKGLDGALTAKLLSKPDHYGAAWHGLSFAEKDTFVGKLLDEADEERLIRRLVTENRLSEDAARRCASIPLADGYGRLGRTANTEILAALVEETDETGTVVTYAEAVRRAGERTGRNWHHSDERDGVILDRLPYYGEILQRHVVPGSGEPEEKNEAARWGRLANPTVHIGLNQLRKVVNRLIAAHGRPDQIVVELARELKLNREQKERLDRENRKNREENERRTAILAEHGQRDTAENKIRLRLFEEQARANAGIALCPYTGRAIGIAELFTSEVEIDHILPVSLTLDDSLANRVLCRREANREKRRQTPFQAFGATPAWNDIVARAAKLPPNKRWRFDPAALERFEREGGFLGRQLNETKYLSRLAKIYLGKICDPDRVYVTPGTLTGLLRARWGLNSILSDSNFKNRSDHRHHAVDAVVIGVLTRGMIQRIAHDAARAEDQDLDRVFRDVPVPFEDFRDHVRERVSTITVAVKPEHGKGGALHEDTSYGLVPDTDPNAALGNLVVRKPIRSLTAGEVDRVRDRALRARLGALAAPFRDESGRVRDAKGLAQALEAFGAENGIRRVRILKPDASVVTIADRRTGVPYRAVAPGENHHVDIVQMRDGSWRGFAASVFEVNRPGWRPEWEVKKLGGKLVMRLHKGDMVELSDKDGQRRVKVVQQIEISANRVRLSPHNDGGKLQDRHADADDPFRWDLATIPLLKDRGCVAVRVDPIGVVTLRRSNV

SEQ ID NO: 637 - protein, 1405 aa, Riemerella anatipestifer
MKTILGLDLGTNSIGWALVKEAENSNEKSEIIKLGVRVNPLTVDEKTNFEAGRPLSTNADRTAKRSARRNLQRYKLRRKNLIDLLIKNQLIDKDTPLTEIGKNTTHQTLELRAKAARERIELEDLARVFLAINKKRGYRSSRKVNNEEEGQAVDGMAVAKKLYDENLTPGQYAYELLSKGKKYVPDFYRSDLQAEFNAIWEYQKQFYADILDDELYNALKGQGQQNSRKRFLAIKGVYTAENKGKRDDVKLRHYKWRSEAISKKINIEEVAYVLVEINNDLNKSSGYLGAISDRSKELYFNKETVGENLWKQIQKNPHTSLKNQVFYRQDYLDEFEQIWETQAQFHPQLTLALKEQIRDVIIFYQRKLKSQKGLLSFCQFESWEIERKDENGNVILNKTTQLPKRQTVGRRVAPKSSPLFQEFKIWQNINNLEVTKISEGASKNKKETETLSDDERKLLFEELNLRGNLSQKEVLQILGLKDKEYKTNFSEGLEGNRTNAALFNIYQQIAENEGYGFDWSKKSAQEIKEELKAVFPQIGIQADILDFNANLDGKEFENQASYQLWHLLYSAEEDDKINEEDQIIYGNSAVSLKKKLCEKFGFTPEYAKWIANVSLQDDYGNLSTKAMRKIIPYLIDGNDYSEACALAGYNHSNSLTKEENDNRELLDKLELLPKNSLRNPVVEKILNQMVNVVNQVIETYGKPDEVRIELARELKKSAEKRAEMTKSINEATRRNEDIKKLITKDFGIPNPTKSDVVRYRLWEELAPLAYKDVFTGKQIKKEDLFSSKIDIEHIIPKALLFDDSFSNKTLVFRETNLKKADRTAYDFIESDYNATLDDYIQRVETLYNNTKGTISKGKRNKLLMAQKNLPDGFIERDLRNSQYIAKKAKAMLYQVFKDVNVTSGSITDRLREDWDLINVMKELNFPKYKALGLTEIEERYDIGQEKTKRVEVITDWTKRNDHRHHAMNALTVAFTTSSHIQYLNYLNARKNESHKEHKNIKGIENKITHKQKDKRKFIPPMPNFREEAKKHIETILVSIKNKNKVYTKNINKTKKKSGHNTKEQLTPRGQLHKETVYGKSKRPMSKPTKINKNFSLEQAQLIINVQEKELVLRHLAQFDNNPAVAFDTKTLKKMPLLKNGEPLKEVLCFEEIFTIRKDITPDLKIEKVVDEKIKAILEQRKKDFGGNAKEAFSDLDKNPIWLNKKKGICIKRVTITGVSNAEALHHQKDHLGREILDDNGNPIPADFVSTGNNHHLAVYLDSEGKLQDNIVSFYEAVVRTSQGLPVVDKGLNKDLGWKFLFSLKQNEMFVFPNDDFDINDFDLLDDKKAELISKHLYRVQKISKVSAGNSFVRDIVFRHHLETTVKEVKELKDISYIQLKSLEGLRNIKKVRINHIGKIVQVGEY

SEQ ID NO: 638 - protein, 1145 aa, Riemerella anatipestifer
MKTILGLDLGTNSIGWALVKETENSNEKSEIIKLGVRVNPLTVDEKTNFEAGRPLSTNADRTAKRSARRNLQRYKLRRKNLIDLLIKHRLIDKDTPLTEIGKNTTHQTLELRAKAARERIELEDLARVFLAINKKRGYRSSRKVNNEEEGQVVDGMAVAKKLYDENLTPGQYAYELLSKGKKYVPDFYRSDLQAEFDSIWEYQKQFYADILDDELYNALKGQGQQNSRKRFLAIKGVYTAENKGKRDEVKLQHYKWRSEAITQKLSIEEVAYVLVEINNDLNKSSGYLGAISDRSKELYFNKETVGENLWKQIQKNPHTSLKNQVFYRQDYLDEFEQIWETQAQFHPQLTLALKEQIRDVVIFYQRKLKSQKGLLSFCQFESWEIERKDENGNVILNKTTQLPKRQTVGRRVAPKSSPLFQEFKIWQNINNLEIAKISDGNSKNKKETEALSDDERKLLFEELNLRGNLSQKEVLQILGLKDKEYKTNFPEGLEGNRTNAALFNIYQQIAENEGYGDWTKKSAQEIKEELKAVFPQIGIQADILDFNAELDGKEFENQASYQLWHLLYSAEEDDKINEEDQIIYGNSAVSLKKKLCEKFGFTPEYAKWIANVSLQDDYGNLSTKAMRKIIPYLIDGNDYSEACALAGYNHSNSLTKEENDNRERLNKLELLPKNSLRNPVVEKILNQMVNVVNQVIETYGKPDEVRIELARELKKSAEERAEMTKGINEATRRNEDIKKLITKNFGIPNPTKNDVVRYRLWEELAPLAYKDVFTGRQIKKEDLFSSKIDIEHIIPKALLFDDSFSNKTLAFRETNLKKADRTAYGFIESDYNATLDDYIQRVETLYNNAKGTISKGKRNKLLMAQKNLPDGFIERDLRNSQYIAKKAKSMIEKVFNDVNVTSGSITDRLREDWDLINVMKELNFPKYKALGLTEIEERYDIGQEKTKKVEVITDWTKRNDHRHHAMDALTVAFTTKSHVQYLNNLNTIHSLKGDEVDLELSKLYGLKNTITEVVNKKRKFIPPMPNFREEAKKHIETILVSIKNKNKVYTKNINKTKKESGYHTKEQLTPRGQLHKETVYGKSKRPMNKPTKINKNFSLEQAQLIINVQEKELVLRHLAQFDNNPAVAFDTKTLKKCHYLKMVNL

SEQ ID NO: 639 - protein, 1400 aa, Riemerella anatipestifer
MKTILGLDLGTNSIGWALVKETENSNEKSEIIKLGVRVNPLTVDEKTNFEAGRPLSTNADRTAKRSARRNLQRYKLRRKNLIDLLIKHRLIDKDTPLTEIGKNTTHQTLELRAKAARERIELEDLARVFLAINKKRGYRSSRKVNNEEEGQVVDGMAVAKKLYDENLTPGQYAYELLSKGKKYVPDFYRSDLQAEFDSIWEYQKQFYADILDDELYNALKGQGQQNSRKRFLAIKGVYTAENKGKRDEVKLQHYKWRSEAITQKLSIEEVAYVLVEINNDLNKSSGYLGAISDRSKELYFNKETVGENLWKQIQKNPHTSLKNQVFYRQDYLDEFEQIWETQAQFHPQLTLALKEQIRDVVIFYQRKLKSQKGLLSFCQFESWEIERKDENGNVILNKTTQLPKRQTVGRRVAPKSSPLFQEFKIWQNINNLEIAKISDGNSKNKKETEALSDDERKLLFEELNLRGNLSQKEVLQILGLKDKEYKTNFPEGLEGNRTNAALFNIYQQIAENEGYGDWTKKSAQEIKEELKAVFPQIGIQADILDFNAELDGKEFENQASYQLWHLLYSAEEDDKINEEDQIIYGNSAVSLKKKLCEKFGFTPEYAKWIANVSLQDDYGNLSTKAMRKIIPYLIDGNDYSEACALAGYNHSNSLTKEENDNRERLNKLELLPKNSLRNPVVEKILNQMVNVVNQVIETYGKPDEVRIELARELKKSAEERAEMTKGINEATRRNEDIKKLITKNFGIPNPTKNDVVRYRLWEELAPLAYKDVFTGRQIKKEDLFSSKIDIEHIIPKALLFDDSFSNKTLAFRETNLKKADRTAYGFIESDYNATLDDYIQRVETLYNNAKGTISKGKRNKLLMAQKNLPDGFIERDLRNSQYIAKKAKSMIEKVFNDVNVTSGSITDRLREDWDLINVMKELNFPKYKALGLTEIEERYDIGQEKTKKVEVITDWTKRNDHRHHAMDALTVAFTTKSHVQYLNNLNTIHSLKGDEVDLELSKLYGLKNTITEVVNKKRKFIPPMPNFREEAKKHIETILVSIKNKNKVYTKNINKTKKESGYHTKEQLTPRGQLHKETVYGKSKRPMNKPTKINKNFSLEQAQLIINVQEKELVLRHLAQFDNNPAVAFDTKTLKKMPLLKNGEPLKEVLCFEEIFTIRKDITPDLKIEKVVDEKIKAILEQRKKDFGGNAKEAFSDLDKNPIWLNKEKGICIKRVTITGVSNAEALHHQKDHLGREILDDNGNPIPADFVSTGNNHHVAIYEDEKGKLQEKVVSLYEAVARANQGLPVVDKGLNEDLGWKFLFTMKQNEMFVFPNDDFDVNDIDLLDENNAKIISQHLFRVQKLATKNYMFRHHLETNVQEVKELNDIAYKSIRSTEPLKNIKKVRINHIGKIVQVGEY

SEQ ID NO: 640 - protein, 1128 aa, Roseburia intestinalis
MDEKMDYRIGLDIGIASVGWAVLQNNSDDEPVRIVDLGVRIFDTAEIPKTGESLAGPRRAARTTRRRLRRRKHRLDRIKWLFENQGLINIDDFLKRYNMAGLPDVYQLRYEALDRKLTDEELAQVLLHIAKHRGFRSTRKAETAAKENGAVLKATDENQKRMQEKGYRTVGEMIYLDEAFRIGCSWSEKGYILTPRNKAENYQHTMLRAMLVEEVKEIFSSQRRLGNKKATEELEEKYLEIMTSQRSFDLGPGMQPDGKPSPYAMEGFSDRVGKCTFLGDQGELRGAKGTYTAEYFVALQKINHTKLVNQDGETRNFTEEERRALTLLLFTQKEVKYAAVRKKLGLPEDILFYNLNYKKAATKEEQQKENQNTEKAKFIGMPYYHDYKKCLEERVKYLTENEVRDLFDEIGMILTCYKNDDSRTERLAKLGLVPIEMEGLLAYTPTKFQHLSMKAMRNIIPFLEKGMTYDKACEEAGYDFKADSKGTKQKLLTGENVNQTINEITNPVVKRSVSQTVKVINAIIRTYGSPQAINIELAREMSKTFEERRKIKGDMEKRQKNNEDVKKQIQELGKLSPTGQDILKYRLWQEQQGICMYSGKTIPLEELFKPGYDIDHILPYSITFDDSFRNKVLVTSQENRQKGNRTPYEYMGNDEQRWNEFETRVKTTIRDYKKQQKLLKKHFSEEERSEFKERNLTDTKYITTVIYNMIRQNLEMAPLNRPEKKKQVRAVNGAITAYLRKRWGLPQKNRETDTHHAMDAVVIACCTDGMIQKISRYTKVRERCYSKGTEFVDAETGEIFRPEDYSRAEWDEIFGVHIPKPWETFRAELDVRMGDDPKGFLDTHSDVALELDYPEYIYENLRPIFVSRMPNHKVTGAAHADTIRSPRHFKDEGIVLTKTALTDLKLDKDGEIDGYYNPQSDLLLYEALKKQLLLYGNDAKKAFAQDFHKPKADGTEGPVVRKVKIQKKQTMGVFVDSGNGIAENGGMVRIDVFRVNGKYYFVPVYTADVVKKVLPNRASTANKPYSEWRTMEDKDFLFSLYSRDLVHIKSKKGIPIKNVDGSLGESKEVYAYYIGADISGAKIEGKAHDSRYTFRGIGVQKLELIEKCQVDILGHISTVKNEKRMGFS

SEQ ID NO: 641 - protein, 1471 aa, Scardovia wiggsiae
MGYKAPRNDKGEIDYGVGLDLGNGSVGWVAMDKDYHLIRARGHELIGARLFDPANSAENRRESRTTRRRLSRRRWRLRMLDSLFASELAKIDPNFLARRKYSWVHPKDEQNHENWYGSIIFGSKEQDKQFYKDYPTIYHLRKKLTEDTERHDIREIYVAIHHIVKYRGHFLREGEINSENLFDPEGFVELIKDVIKLNNSYDESTPIFEASPADVSEALLNEHTSRSGRIEDTLDKLDFSVSRVDKHELKGMRDAAKAVIGAIVGNTADFSKIFNLDNLDKDSKDNLKLKFADSNFDEKYGGVVGSGLLDETQIELVDRIHAVYDAVALKGILGDAHTISEAKVESYEKHRKNWKLIKEELRTKENKDEVDLWYGDLSGRQYKNPPDPEKGPDEGSKKDSPIRDSDQKQNLIKKANDYFTELIDDSQLSEEQKNCLKNDINNGQLFPVQRSSDNGVIPYQIHLNELRRIIENQKQYYPFLAETFIRKTAEGKSYEENKIVALLKFRVPYYVGPLVSKEDMEEHSSGNSAYHWMARNPGRGEAITPWNFDEVVDKDESGARFISRLTGTDTYLLGEPTLPQHSLLYEEYMVLSELNNVRLNVRQGNHWSDKNRQRLSYKQKEFLIENLFKEHKTVTRKRAEDCLSSMGCGEVQLFGLSDEKKFASSLSSYITLKKILGKAFVDDSGNSAILERIIEVQTVFEDREPLTHQLSLIDSLTVEQRKQLAKIHYTGWGKLSRKLLTSKKGSYKIHSQNEIMRTQHSIIDIMRGDSLNLIEIIRDKKIGIGEWIDNENLDRETGESDVSRLESVFEGIVMSPRVKRGVVQAVRVIDDLAKAIGNPPQRIFIEMADEVQASQRTVSRLSRLKALYGSPSLQKEFNDLKDLRKSLNETKDADLQEDRLYLYYIQLGKDLYTGKEISIDSLSSAYDIDHIVPQALTQDDSIDNRVLVSRKENARKTDSYLYTPDLIKNMRPLWGKLLAAGLMSQKKYDALTRVDDFKDREKQRFVQRSLVETRQIMKNVSTILRTYYGEDTNVVTLKSSITHDMRKYLGFPYKNRDINDYHHAQDALCISAAGQFMLNRHFVSGGEVTDGASNAYNMYLAEYLQEFRDAKARGERKRSTAFGFVVGSMSSKDDEKRTDHRTGEIVWSETNAEYLRKVMNYKKMLITQKVGDVKTRALYDETRYGHKESSAKSIKFDNLRRDTSLYGGFSGASTAYMMLVEYKKKNKLVSITAQEASLLAVADQKNDTVSVMDGILASHGLSGAKILLPKIVTGQLLDYSDALVTLQSASELNTARQMWLPRNDYNDIDIILKSKDIEDAAHKLGYDSDTVHVLRRIQKLFEAVFRVAESQFPLHQLSKDQQEEILRDPQNYGFGSAVKLLGGLLKALHANAENTNLAGLVKVLHGDKEYSDDGKAKEFKKFGFSPRWRRISNPTGFTLSDSDTFIYQSPSGIFEQRVTVKELKEKADKQK

SEQ ID NO: 642 - protein, 116 aa, Sphingobacterium spiritivorum
MFRKYFEEKNSARLLFTLKQGDFVYVPDDNEEVILDESSPLFIDYWKNISERSNNIHVVQKFSGKEIYFLKHTIADTIAKKIEFGSQDCYQSLNGKSIKEFCIKIDSDRLGNISKV

SEQ ID NO: 643 - protein, 1306 aa, Sphingobacterium spiritivorum; identical to SEQ ID NO: 107

SEQ ID NO: 644 - protein, 1110 aa, Sphingobium sp.
MAEGKKRIWRLGADLGANSLGWAAIELSAPVNGKPIAILAAGSRIFSDGRDPKSGASLAVDRRDARAMRRRRDRFKQRQKALIKYLIADGLFPADEAARNAMAAIDPYAVRARALDEALSLPELGRALFHLNQRRGFKSNRKADRKADDDAGKIAIGIDRTRDAIAEDEADAGAEPGSWTFGKWLHERRLKGQSVRTRLRPESGEDAKGDGYDFYPDRALMEEEFDAIWAAQAPHHPDVLTNDVHDRLHEIIFYQRPLKAPQVGMCSLIPGDRRLPKAHPLFQRRRLLEELNALMIVRPGEVAQRLTREERDILLLKLKDKNKVSFATLRKALKLDPDARFNKESEDRTDLKGDEVAAVMGSKTRFGNLWVHLSIEAQWDVLARLDAVESDAEDAAFCAWLVETYALTPEQARAVANAPLPPGYGRFGETATRKLIEALRDGKKDDRVLVYSEAVTEAGLGHHSDRRTGEVFEDAKGRPQLPYYGVALERHIMPGTGDPSDPEEMRVGRLTNPTVHIGLNQLRRILNVLIRAYGPPAEIAIELARELKLTDEDKKRINRENNDNRIAAERRSEKLLAIGQADSGANRALLKLWEELNPANVLDRRCIYSGRQISIDMLFSAAVEVDHILPFAATLDDSNGNKIVCLREANREKRKRSPHDAWGHSARWDEIAARAAQLPRNKRWRFEPDAMDKFRDEGGFQARHLVDTQYLARLSREYLATLYPEKGEGSGHIWVSPGRLTEMVRRKLGLNDLLPDHNFGGGADQAKNRLDHRHHAIDAVVVAIVDRGMLNAIARASGQEGAEGRERIIIPEPWDGFRDALRETVNRITVSHRTDHGTASKAGLPKGKDATAGRLHNDTAYGFTGDTDAKGNSIVVRRVPLSSFKKLADLDRIRDADLKAALYQHLNGLEGKAFEKALAEFHKLEWHNFGGVRRVRVTEPLTVIPIKDRNGRIYKGYKGDSNYRYDVWELPDGKWVTNWKNEAGEAMSSVISMFDAHQSSEPPRPHPAARKILSLHQNDLLAIEREGEDRKLMRVVKFGQSGQITLAEHQQAGDLKKRDAVSNDDDPFKYFAPTSGGLKKVKARQVRIDEIGRVLDPGFPARTARRKTRG

SEQ ID NO: 645 - protein, 1084 aa, Sporolactobacillus vineae
MKYSIGLDIGISSVGWSVINLDRERIELMGARLFDAAENPKNGSSLAAPRRDARSARRRLRRRRYRVGRVRHFIIDRGLVTRGQADQLFDWKDGDLDIWLVRVNALERLLTDREFARVLIHIAKNRGYRSNRKSEAKSGENGQVLSAIKANKELMEEKGYQTVAEMLVNEPETFAGRKRNRGGEYTHVIARSELEHEIRLIFTKQRAFGNRFATEENENTYVKIWAAQRPVATKDDILKKIGDCTFEKGEKRAPKASYAFQYFRALDKLNRLRILSVREPSRNLTDDERNLIVPALFNHDKQKYSDLRKILQLRDDQKFNELFYDPGKSLKENENKTFLSLAEQYKIRKVIRDVQGKDGLLQYRPLDIDTIAYALTVFKDDQDTRDYLSNTFVNGNGKQVLNLANRAFDAELIDGLLSLSFAKFGHLSLKALHKLIPHMEQGLSYYDACKKVGYHDNEQVGKSKQHLLPVIPADEIRNPVVVRSLSQTRKVINAIIKRYGSPTFMYIELAREMGRPYNERRDLEKQYNKNRTVNDSAIEQIHELYPEIGAPRGHDILKYKLWQQQDCKCAYSLEKIPAEKIFEPGYAEVDHIIPYSRSFDDSNSNKVLVLSRMNQEKKNRTPYEWFGGDEHRWNKFESYVNALKVNRKKKSLLTKKNMDTEEEDTFKSRHLNDTRYITRFIKSFVEDNLLFREIEGAKQHVFTVNGAYTSLMRKRWGFNKNREESDLHHSVDAVIIAVSQPFRNEVSRYFKHREISLPQLLKRTWDYFPEPWEGFVKELRARTLQDPEKLKLALESLDLDSYDPEFIDEVKPIFISRMPKRSIKGQIHDETLRRNRGKTKDGFVKIVTRTRLENIKFDKNGDFPMYGRESDPKTYQAIKQRYLENNKDKKKAFIEPLYKPAKNPNNASLIRSVKIEDKANQIVPLRDEAVAYNASIVRTEVYRNKETGKFYLAPVYVSDVFAGREPRRFIRANVPYEQWVNITDKFTFLFNLYPNDVIYIKMKKVKTTKSNINKTISWQESYFYFKGTDIHTGAITIIDHMNSFTDRVGTQGLQLFEKYQVDPLGNLSRVHGETQYGVPALSHS

SEQ ID NO: 646 - protein, 475 aa, Staphylococcus massiliensis
MGQDYILGLDIGITSVGYGLIDYHDKSVIDAGVRLFKEANVENNEGRRSKRGSRRLQRRRKHRLARTRNLLESYQLNPFPKCEKNPYEIRVKGFKEVLTSDELSAALLHLAKRRGIDNVHVTDTESDSSDNGLSTKEQLAKNQKALESRYVCELQLERLLNDNKVRGANNRFKTQDFVREAKQILSIQKDHHNLDQVFIDKYISLLETRREYYEGPGKGSPYGWDGDIKKWYELLMGRCTYFPESLRSVKYAYSADLFNALNDLNNLVIVRDENDKLTYPEKYHIVENVFKQRKKPTLKQIAKEIDVAPEDIRGYRVTASGTPVFTSFKLYHDIKSVTSNDKVLEDTELLDAIAEVLTIYQSPIEVQEKLESLNVILTKEEIEGISKLTGYTGTHALSLKAIQIVIDELWETNDNQMTIFTRLNMKPQKVDLAKANKIPTSLVEDFIISPVAKRAFIQSIKVINAVIKNMVCLKI

SEQ ID NO: 647 - protein, 581 aa, Staphylococcus massiliensis
MPKDIIIELAREKNSDEERKIIRDVQKRNQQTRDLVDKVIKETGKTKAKGMVEKLILHDKQEGKCLYSLKSIPLEDLLNNPHHYEVDHIIPRSVSYDNSMNNKVLVLQEENSKKSNQTPFQYFNSSNTHITFKQFKQHVLNLSKTKDRITKKKKEYLLEERDINKFSVQKEFINRNLVDTRYATRELMTLLRAYFSANELDVKVKAINGGFTSYLRKRWDFKKDRNAGYKHHAEDALIIANVDFIFKQLKALDNAKKVMEGRKVQVEKDNVEDNEHYESLFREPDQIKEIKLYDNYKFSHRVDKKPNRELINDTIYSTRKVDNKTYTIQTVNNIYDKQNDQLKKLFNKSPEKFLMYKHDPKTFDKLATIMRQYKNEKNPLYKFHDETGEYLTKYAKKDNGPIVKSLKYIGKQVNAHLDITNDYENSNNKVVKLSLKPFRFDVYLDDGKYKFVTVKYLDIIKKDTYYVIDEEKYKLALQQKKISENAKFIGSFYNNDLIKINGELLRVIGVNDDAKNTLELNMIDISYRDYVENMNLATTPRIRKNIGKSITILEKYTTDILGNTFKISSPEKPQFIFKVRD

SEQ ID NO: 648 - protein, 1334 aa, Staphylococcus pseudintermedius; identical to SEQ ID NO: 214

SEQ ID NO: 649 - protein, 1112 aa, Staphylococcus simulans; identical to SEQ ID NO: 261

SEQ ID NO: 650 - protein, 773 aa, Streptococcus agalactiae
MNKPYSIGLDIGTNSVGWSIITDDYKVPAKKMRVLGNTDKEYIKKNLIGALLFDGGNTAADRRLKRTARRRYTRRRNRILYLQEIFAEEMSKVDDSFFHRLEDSFLVEEDKRGSKYPIFATLQEEKDYHEKFSTIYHLRKELADKKEKADLRLIYIALAHIIKFRGHFLIEDDSFDVRNTDISKQYQDFLEIFNTTFENNDLLSQNVDVEAILTDKISKSAKKDRILAQYPNQKSTGIFAEFLKLIVGNQADFKKYFNLEDKTPLQFAKDSYDEDLENLLGQIGDEFADLFSAAKKLYDSVLLSGILTVIDLSTKAPLSASMIQRYDEHREDLKQLKQFVKASLPEKYQEIFADSSKDGYAGYIEGKTNQEAFYKYLSKLLTKQEDSENFLEKIKNEDFLRKQRTFDNGSIPHQVHLTELKAIIRRQSEYYPFLKENQDRIEKILTFRIPYYIGPLAREKSDFAWMTRKTDDSIRPWNFEDLVDKEKSAEAFIHRMTNNDFYLPEEKVLPKHSLIYEKFTVYNELTKVRYKNEQGETYFFDSNIKQEIFDGVFKEHRKVSKKKLLDFLAKEYEEFRIVDVIGLDKENKAFNASLGTYHDLEKILDKDFLDNPDNESILEDIVQTLTLFEDREMIKKRLENYKDLFTESQLKKLYRRHYTGWGRLSAKLINGIRDKESQKTILDYLIDDGRSNRNFMQLINDDGLSFKSIISKAQAGSHSDNLKEVVGELAGSPAIKKGILQSLKIVDELVKVMGYEPEQIVVEMARENQTTNQ

SEQ ID NO: 651 - protein, 1370 aa, Streptococcus agalactiae
MNKPYSIGLDIGTNSVGWSIITDDYKVPAKKMRVLGNTDKEYIKKNLIGALLFDGGNTAADRRLKRTARRRYTRRRNRILYLQEIFAEEMSKVDDSFFHRLEDSFLVEEDKRGSKYPIFATMQEEKDYHEKFPTIYHLRKELADKKEKADLRLVYLALAHIIKFRGHFLIEDDRFDVRNTDIQKQYQAFLEIFDTSFENNHLLSQNVDVEAILTDKISKSAKKDRILAQYPNQKSTGIFAEFLKLIVGNQADFKKHFNLEDKTPLQFAKDSYDEDLENLLGQIGDEFADLFSAAKKLYDSVLLSGILTVTDLSTKAPLSASMIQRYDEHREDLKQLKQFVKASLPEKYQEIFADSSKDGYAGYIEGKTNQEAFYKYLSKLLTKQEDSEYFLEKIKNEDFLRKQRTFDNGSIPHQVHLTELKAIIRRQSEYYPFLKENQDKIEKILTFRIPYYVGPLARGNSDFAWMTRKTDDSIRPWNFEDLVDKEKSAEAFIHRMTNNDLYLPEEKVLPKHSLIYEKFTVYNELTKVRYKNEQGETYFFDSNVKQEIFDGVFKEHRKVSKKQLLDFLAKEFEEFRIVDVTGLDKENKAFNASLGTYHDLKKILDKDFLDNPDNESILEDIVQTITLFEDREMIKKRLENYKDLFTESQLKKLYRRHYTGWGRLSAKLINGIRDRESQKTILDYLISDGRANRNFMQLINDDGLSFKSIISKAQSGSHSDNLKEVVGELAGSPAIKKGILQSLKIVDELVKVMGYEPEQIVVEMARENQTTNQGRRNSRQRYKLLEDGVKNLASDLNGDILKEYPTDNQALQNERLFLYYLQNGRDMYTGEALDIDNLSQYDIDHIVPQAFIKDDSIDNRVLVSSAKNRGKSDDVPSIDIVKARKAFWKKLLDAKLISQRKYDNLTKAERGGLTPDDKAGFIQRQLVETRQITKHVARILDERFNNKVDDNNKPIRKVKIVTLKSNLVSNFRKEFGFYKIREVNNYHHAHDAYLNAVVAKAILTKYPQLEPEFVYGDYPKYNSYKTRKSATEKLFFYSNIMNFFKTKVTLADETVVVKDDIEVNNETGEIAWDKKKHFATVRKVLSYPQVNIVKKTEVQTGGFSKESILAHSNSDKLIPRKTKDIYLDPKKYGGFDSPIVAYSVLVLADIKKGKAQKLKTVKELIGITIMERERFEKNPSAFLESKGYLNIRTDKLIILPKYSLFELENGRRRLLASAGELQKGNELALPTQYMKFLYLASRYNESKGKPEEIEKKQEFVNQHVSYFDDILQLINDFSKRVILADANLEKINKLYSDNKDNTPVDELAKNIINLFTFTSLGAPAAFKFFDKSVDRKRYTSTKEVLDSTLIHQSITGLYETRIDLGKLGED

SEQ ID NO: 652 - protein, 1370 aa, Streptococcus agalactiae
MNKPYSIGLDIGTNSVGWSIITDDYKVPAKKMRVLGNTDKEYIKKNLIGALLFDGGNTAADRRLKRTARRRYTRRRNRILYLQEIFAEEMSKVDDSFFHRLEDSFLVEEDKRGSKYPIFATMQEEKDYHEKFPTIYHLRKELADKKEKADLRLVYLALAHIIKFRGHFLIEDDRFDVRNTDIQKQYQAFLEIFDTSFENNHLLSQNVDVEAILTDKISKSAKKDRILAQYPNQKSTGIFAEFLKLIVGNQADFKKHFNLEDKTPLQFAKDSYDEDLENLLGQIGDEFADLFSAAKKLYDSVLLSGILTVTDLSTKAPLSAYMIQRYDEHREDLKQLKQFVKASLPEKYQEIFADSSKDGYAGYIEGKTNQEAFYKYLSKLLTKQEDSEYFLEKIKNEDFLRKQRTFDNGSIPHQVHLTELKAIIRRQSEYYPFLKENQDKIEKILTFRIPYYVGPLARGNSDFAWMTRKTDDSIRPWNFEDLVDKEKSAEAFIHRMTNNDLYLPEEKVLPKHSLIYEKFTVYNELTKVRYKNEQGETYFFDSNVKQEIFDGVFKEHRKVSKKQLLDFLAKEFEEFRIVDVTGLDKENKAFNASLGTYHDLKKILDKDFLDNPDNESILEDIVQTITLFEDREMIKKRLENYKDLFTESQLKKLYRRHYTGWGRLSAKLINGIRDRESQKTILDYLISDGRANRNFMQLINDDGLSFKSIISKAQSGSHSDNLKEVVGELAGSPAIKKGILQSLKIVDELVKVMGYEPEQIVVEMARENQTTNQGRRNSRQRYKLLEDGVKNLASDLNGDILKEYPTDNQALQNERLFLYYLQNGRDMYTGEALDIDNLSQYDIDHIVPQAFIKDDSIDNRVLVSSAKNRGKSDDVPSIDIVKARKAFWKKLLDAKLISQRKYDNLTKAERGGLTPDDKAGFIQRQLVETRQITKHVARILDERFNNKVDDNNKPIRKVKIVTLKSNLVSNFRKEFGFYKIREVNNYHHAHDAYLNAVVAKAILTKYPQLEPEFVYGDYPKYNSYKTRKSATEKLFFYSNIMNFFKTKVTLADETVVVKDDIEVNNETGEIAWDKKKHFATVRKVLSYPQVNIVKKTEVQTGGFSKESILAHSNSDKLIPRKTKDIYLDPKKYGGFDSPIVAYSVLVLADIKKGKAQKLKTVKELIGITIMERERFEKNPSAFLESKGYLNIRTDKLIILPKYSLFELENGRRRLLASAGELQKGNELALPTQYMKFLYLASRYNESKGKPEEIEKKQEFVNQHISYFDDILQLINDFSKRVILADANLEKINKLYSDNKDNTPVDELAKNIINLFTFTSLGAPAAFKFFDKSVDRKRYTSTKEVLDSTLIHQSITGLYETRIDLGKLGED

SEQ ID NO: 653 - protein, 1378 aa, Streptococcus agalactiae
MNKPYSIGLDIGTNSVGWSIITDDYKVPAKKMRVLGNTDKEYIKKNLIGALLFDGGNTAADRRLKRTARRRYTRRRNRILYLQEIFAEEMSKVDDSFFHRLEDSFLVEEDKRGSKYPIFATMQEEKYYHEKFPTIYHLRKELADKKEKADLRLIYLALAHIIKFRGHFLIEDDRFDVRNTDIQKQYQAFLEIFDTTFENNDLLSQNVDVEAILTDKISKSAKKDRILARYPNQKSTGIFAEFLKLIVGNQADFKKHFNLEDKTPLQFAKDSYDEDLENLLGQIGDEFADLFSAAKKLYDSVLLSGILTVIDLSTKAPLSASMIQRYDEHHEDLKHLKQFVKASLPENYREVFADSSKDGYAGYIEGKTSQEAFYKYLLKLLTKQEGSEYLLEKIKNEDFLRKQRTFDNGSIPHQVHLTELRAIIRRQSEYYPFLKENLDRIEKILTFRIPYYVGPLAREKSDFAWMTRKTDDSIRPWNFEDLVDKEKSAEAFIHRMTNNDLYLPEEKVLPKHSLIYEKFTVYNELTKVRFLAEGFKDFQFLNRKQKETIFNSLFKEKRKVTEKDIISFLNKVDGYEGIAIKGIEKQFNASLSTYHDLKKILGKDFLDNTDNELILEDIIQTLTLFEDREMIKKRLDIYKDFFTESQLKKLYRRHYTGWGRLSAKLINGIRNKENQKTILDYLIDDGSANRNFMQLIKDAGLSFKPIIDKARTGSHSDNLKEVVGELAGSPAIKKGILQSLKIVDELVKVMGYEPEQIVVEMARENQTTAKGLSRSRQRLTTLRESLGNLKSNILEEKKPKYVKDQVENHHLSDDRLFLYYLQNGKDMYTDDELDIDNLSQYDIDHIIPQAFIKDDSIDNRVLVSSAKNRGKSDDVPSIEIVKARKMFWKNLLDAKLMSQRKYDNLTKAERGGLTSDDKARFIQRQLVETRQITKHVARILDERFNNELDSKGRRIRKVKIVTLKSNLVSNFRKEFGFYKIREVNNYHHAHDAYLNAVVAKAILTKYPQLEPEFVYGLYRRKKLSKIVREDKEEKYSEATRKMFFYSNLMNMFKRVVRLADGSIVVRPVIETGRYMGKTAWDKKKHFATVRKVLSYPQNNIVKKTEIQTGGFSKESILAHGNSDKLIPRKTKDIYLDPKKYGGFDSPIVAYSVLVVADIKKGKAQKLKTVTELLGITIMERSRFEKNTSAFLESKGYLNIRDDKLMILPKYSLFELENGRRRLLASAGELQKGNELALPTQFMKFLYLASRYNESKGKPEEIEKKQEFVNQHVSYFDDILQLINDFSNRVILADANLEKINKLYQDNKENIPVDELANNIINLFTFTSLGAPAAFKFFDKIVDRKRYTSTKEVLNSTLIHQSITGLYETRIDLGKLGEG

SEQ ID NO: 654 - protein, 1370 aa, Streptococcus agalactiae
MNKPYSIGLDIGTNSVGWSIITDDYKVPAKKMRVLGNTDKEYIKKNLIGALLFDGGNTAADRRLKRTARRRYTRRRNRILYLQEIFAEEMSKVDDSFFHRLEDSFLVEEDKRGSKYPIFATMQEEKYYHEKFPTIYHLRKELADKKEKADLRLIYLALAHIIKFRGHFLIEDDRFDVRNTDIQKQYQAFLEIFDTTFENNDLLSQNVDVEAILTDKISKSAKKDRILARYPNQKSTGIFAEFLKLIVGNQADFKKHFNLEDKTPLQFAKDSYDEDLENLLGQIGDEFADLFSAAKKLYDSVLLSGILTVTDLSTKAPLSASMIQRYDEHREDLKQLKQFVKASLPEKYQEIFADSSKDGYAGYIEGKTNQEAFYKYLSKLLTKQEGSEYLLEKIKNEDFLRKQRTFDNGSIPHQVHLTELRAIIRRQSEYYPFLKENLDRIEKILTFRIPYYVGPLAREKSDFAWMTRKTDDSIRPWNFEDLVDKEKSAEAFIHRMTNNDLYLPEEKVLPKHSLIYEKFTVYNELTKVRFLAEGFKDFQFLNRKQKETIFNSLFKEKRKVTEKDIISFLNKVDGYEGIAIKGIEKQFNASLSTYHDLKKILGKDFLDNTDNELILEDIVQTLTLFEDREMIRKRLDIYKDFFTESQLKKLYRRHYTGWGRLSAKLINGIRNKENQKTILDYLIDDGSANRNFMQLIKDAGLSFKPIIDKARTGSHSDNLKEVVGELAGSPAIKKGILQSLKIVDELVKVMGYEPEQIVVEMARENQTTAKGLSRLRQRLTTLRESLANLKSNILEEKKPKYVKDQVENHHLSDDRLFLYYLQNGKDMYTDDELDIDNLSQYDIDHIIPQAFIKDDSIDNRVLVSSAKNRGKSDDVPSVEIVKDCKVFWKKLLDAKLMSQRKYDNLTKAERGGLTSDDKARFIQRQLVETRQITKHVARILDERFNNELDSKGRRIRKVKIVTLKSNLVSNFRKEFGFYKIREVNNYHHAHDAYLNAVVAKAILTKYPQLEPEFVYGDYPKYNSYKTRKSATEKLFFYSNIMNFFKTKVTLADGTVVVKDDIEVNNDTGEIVWDKKKHFATVRKVLSYPQVNIVKKTEIQTGGFSKESILAHGNSDKLIPRKTKDIYLDPKKYGGFDSPIVAYSVLVVADIKKGKAQKLKTVTELLGITIMERSRFEKNPSAFLESKGYLNIRDDKLMILPKYSLFELENGRRRLLASADELQKGNELALPTQFMKFLYLASRYNELKGKPEEIEQKQEFVVQHVSYFDDILQIINDFSNRVILADANLEKINKLYQDNKENIPVDELANNIINLFTFTSLGAPAAFKFFDKIVDRKRYTSTKEVLNSTLIHQSITGLYETRIDLGKLGED

SEQ ID NO: 655 - protein, 1377 aa, Streptococcus agalactiae
MNKPYSIGLDIGTNSVGWSIITDDYKVPAKKMRVLGNTDKEYIKKNLIGALLFDGGNTAADRRLKRTARRRYTRRRNRILYLQEIFAEEMSKVDDSFFHRLEDSFLVEEDKRGSKYPIFATMQEEKYYHEKFPTIYHLRKELADKKEKADLRLVYLALAHIIKFRGHFLIEDDRFDVRNTDIQKQYQAFLEIFDTTFENNHLLSQNVDVEAILTDKISKSAKKDRILAQYPNQKSTGIFAEFLKLIVGNQADFKKHFNLEDKTPLQFAKDSYDEDLENLLGQIGDEFADLFSVAKKLYDSVLLSGILTVTDLSTKAPLSASMIQRYDEHHEDLKHLKQFVKASLPENYREVFADSSKDGYAGYIEGKTNQEAFYKYLLKLLTKQEGSEYFLEKIKNEDFLRKQRTFDNGSIPHQVHLTELRAIIRRQSEYYPFLKENQDRIEKILTFRIPYYVGPLAREKSDFAWMTRKTDDSIRPWNFEDLVDKEKSAEAFIHRMTNNDLYLPEEKVLPKHSLIYEKFTVYNELTKVRFLAEGFKDFQFLNRKQKETIFNSLFKEKRKVTEKDIISFLNKVDGYEGIAIKGIEKQFNASLSTYHDLKKILGKDFLDNTDNELILEDIVQTLTLFEDREMIKKCLDIYKDFFTESQLKKLYRRHYTGWGRLSAKLINGIRNKENQKTILDYLIDDGSANRNFMQLINDDDLSFKPIIDKARTGSHSDNLKEVVGELAGSPAIKKGILQSLKIVDELVKVMGYEPEQIVVEMARENQTTAKGLSRSRQRLTTLRESLANLKSNILEEKKPKYVKDQVENHHLSDDRLFLYYLQNGRDMYTKKALDIDNLSQYDIDHIIPQAFIKDDSIDNRVLVSSAKNRGKSDDVPSIEIVKARKMFWKNLLDAKLMSQRKYDNLTKAERGGLTSDDKARFIQRQLVETRQITKHVARILDERFNNEVDNGKKICKVKIVTLKSNLVSNFRKEFGFYKIREVNDYHHAHDAYLNAVVAKAILTKYPQLEPEFVYGMYRQKKLSKIVHEDKEEKYSEATRKMFFYSNLMNMFKRVVRLADGSIVVRPVIETGRYMGKTAWDKKKHFATVRKVLSYPQNNIVKKTEIQTGGFSKESILAHGNSDKLIPRKTKDIYLDPKKYGGFDSPIVAYSVLVVADIKKGKAQKLKTVTELLGITIMERSRFEKNPSAFLESKGYLNIRDDKLMILPKYSLFELENGRRRLLASAGELQKGNELALPTQFMKFLYLASRYNESKGKPEEIEKKQEFVNQHVSYFDDILQLINDFSKRVILADANLEKINKLYQDNKENIPVDELANNIINLFTFTSLGAPAAFKFFDKIVDRKRYTSTKEVLNSTLIHQSITGLYETRIDLGKLGED

SEQ ID NO: 656 - protein, 1370 aa, Streptococcus agalactiae
  misc_feature (117)..(117): Xaa can be any naturally occurring amino acid
MNKPYSIGLDIGTNSVGWSIITDDYKVPAKKMRVLGNTDKEYIKKNLIGALLFDGGNTAADRRLKRTARRRYTRRRNRILYLQEIFAEEMSKVDDSFFHRLEDSFLVEEDKRGSKYXIFATLQEEKDYHEKFSTIYHLRKELADKKEKADLRLIYIALAHIIKFRGHFLIEDDSFDVRNTDISKQYQDFLEIFNTTFENNDLLSQNVDVEAILTDKISKSAKKDRILAQYPNQKSTGIFAEFLKLIVGNQADFKKYFNLEDKTPLQFAKDSYDEDLENLLGQIGDEFADLFSAAKKLYDSVLLSGILTVIDLSTKAPLSASMIQRYDEHREDLKQLKQFVKASLPEKYQEIFADSSKDGYAGYIEGKTNQEAFYKYLSKLLTKQEDSENFLEKIKNEDFLRKQRTFDNGSIPHQVHLTELKAIIRRQSEYYPFLKENQDRIEKILTFRIPYYIGPLAREKSDFAWMTRKTDDSIRPWNFEDLVDKEKSAEAFIHRMTNNDFYLPEEKVLPKHSLIYEKFTVYNELTKVRYKNEQGETYFFDSNIKQEIFDGVFKEHRKVSKKKLLDFLAKEYEEFRIVDVIGLDKENKAFNASLGTYHDLEKILDKDFLDNPDNESILEDIVQTLTLFEDREMIKKRLENYKDLFTESQLKKLYRRHYTGWGRLSAKLINGIRDKESQKTILDYLIDDGRSNRNFMQLINDDGLSFKSIISKAQAGSHSDNLKEVVGELAGSPAIKKGILQSLKIVDELVKVMGYEPEQIVVEMARENQTTNQGRRNSRQRYKLLDDGVKNLASDLNGNILKEYPTDNQALQNERLFLYYLQNGRDMYTGEALDIDNLSQYDIDHIIPQAFIKDDSIDNRVLVSSAKNRGKSDDVPSLEIVKDCKVFWKKLLDAKLMSQRKYDNLTKAERGGLTSDDKARFIQRQLVETRQITKHVARILDERFNNELDSKGRRIRKVKIVTLKSNLVSNFRKEFGFYKIREVNNYHHAHDAYLNAVVAKAILTKYPQLEPEFVYGDYPKYNSYKTRKSATEKLFFYSNIMNFFKTKVTLADGTVVVKDDIEVNNDTGEIVWDKKKHFATVRKVLSYPQNNIVKKTEIQTGGFSKESILAHGNSDKLIPRKTKDIYLDPKKYGGFDSPIVAYSVLVVADIKKGKAQKLKTVTELLGITIMERSRFEKNPSAFLESKGYLNIRADKLIILPKYSLFELENGRRRLLASAGELQKGNELALPTQFMKFLYLASRYNESKGKPEEIEKKQEFVNQHVSYFDDILQLINDFSKRVILADANLEKINKLYQDNKENISVDELANNIINLFTFTSLGAPAAFKFFDKIVDRKRYTSTKEVLNSTLIHQSITGLYETRIDLGKLGED

SEQ ID NO: 657 - protein, 1370 aa, Streptococcus agalactiae
MNKPYSIGLDIGTNSVGYSVVTDDYKVPAKKMRVLGNTDKEYIKKNLIGALLFDGGNTASDRRLKRTARRRYTRRRNRILYLQEIFAEEMSKVDDSFFHRLEDSFLVEDDKRGSKYPIFATMQEEKDYHEKFPTIYHLRKELADKKEKADLRLVYLALAHIIKFRGHFLIEDDSFDVRNTDIQRQYQAFLEIFDTTFENNHLLSQNIDVEGILTDKISKSAKKDRILAQYPNQKSTGIFAEFLKLIVGNQADFKKHFNLEDKTPLQFAKDSYDEDLENLLGQIGDEFADLFSVAKKLYDSVLLSGILTVTDLSTKAPLSASMIQRYDEHREDLKQLKQFVKASLPEKYQEIFTDSSKDGYAGYIEGKTNQGAFYKYLSKLLTKQEGSEYFLEKIKNEDFLRKQRTFDNGSIPHQVHLTELKAIIRRQSEYYPFLKENLDRIEKILTFRIPYYVGPLAREKSDFAWMTRKTDDSIRPWNFEELVDKEASAEAFIHRMTNNDLYLPEEKVLPKHSLIYEKFTVYNELTKVRYKNEQGETYFFDSNIKQEIFDGVFKEHRKVSKKKLLDFLAKEYEEFRIVDVIGLDKENKAFNASLGTYHDLKKILDKDFLDNPDNESILEDIVQTLTLFEDREMIKKRLENYKDLFTESQLKKLYRRHYTGWGRLSAKLINGIRDKESQKTILDYLISDGRANRNFMQLIHDDGLSFKPIIDKAQAGSHSDNLKEVVGELAGSPAIKKGILQSLKIVDELVKVMGYEPEQVVVEMARENQTTNQGRRNTRQRYKLLEEGVKNLASDLNGNILKEYPTDNQALQNERLFLYYLQNGRDMYTGEALDIDNLSQYDIDHIVPQAFIKDDSIDNRVLVSSAKNRGKSDNVPSIDIVKARKAFWKKLLDAKLMSQRKYDNLTKAERGGLTSDDKARFIQRQLVETRQITKHVARILDERFNNELDSKGRRIRKVKIVTLKSNLVSNFRKEFGFYKIREVNDYHHAHDAYLNAVVAKAILTKYPQLEPEFVYGDYPKYNSYKTRKSATEKLFFYSNIMNFFKTKVTLADGTVVVKDDIEVNNDTGEIVWDKKKHFATVRKVLSYPQVNIVKKTEIQTGGFSKESILAHGNSDKLIPRKTKDIYLDPKKYGGFDSPIVAYSVLVVADIKKGKAQKLKTVTELLGITIMERFRFEKNPSAFLESKGYLNIRDDKLMILPKYSLFELENGRRRLLASAGELQKGNELALPTQYMKFLYLASRYNELKGKPEEIEQKQEFVVQHVSYFDDILQIINDFSNRVILADANLEKINKLYQDNKENISVDELANNIINLFTFTSLGAPAAFKFFDKIVDRKRYTSTKEVLNSTLIHQSITGLYETRIDLGKLGED

SEQ ID NO: 658 - protein, 1370 aa, Streptococcus agalactiae
MNKPYSIGLDIGTNSVGYSVVTDDYKVPAKKMRVLGNTDKEYIKKNLIGALLFDGGNTASDRRLKRTARRRYTRRRNRILYLQEIFAEEMSKVDDSFFHRLEDSFLVEDDKRGSKYPIFATMQEEKDYHEKFPTIYHLRKELADKKEKANLRLVYLALAHIIKFRGHFLIEDDSFDVRNTDIQRQYQAFLEIFDTTFENNHLLSQNIDVEGILTDKISKSAKKDRILAQYPNQKSTGIFAEFLKLIVGNQADFKKHFNLEDKTPLQFAKDSYDEDLENLLGQIGDEFADLFSVAKKLYDSVLLSGILTVTDLSTKAPLSASMIQRYDEHREDLKQLKQFVKASLPEKYQEIFTDSSKDGYAGYIEGKTNQGAFYKYLSKLLTKQEGSEYFLEKIKNEDFLRKQRTFDNGSIPHQVHLTELKAIIRRQSEYYPFLKENLDRIEKILTFRIPYYVGPLAREKSDFAWMTRKTDDSIRPWNFEELVDKEASAEAFIHRMTNNDLYLPEEKVLPKHSLIYEKFTVYNELTKVRYKNEQGETYFFDSNIKQEIFDGVFKEHRKVSKKKLLDFLAKEYEEFRIVDVIGLDKENKAFNASLGTYHDLKKILDKDFLDNPDNESILEDIVQTLTLFEDREMIKKRLENYKDLFTESQLKKLYRRHYTGWGRLSAKLINGIRDKESQKTILDYLISDGRANRNFMQLIHDDGLSFKPIIDKAQAGSHSDNLKEVVGELAGSPAIKKGILQSLKIVDELVKVMGYEPEQVVVEMARENQTTNQGRRNTRQRYKLLEEGVKNLASDLNGNILKEYPTDNQALQNERLFLYYLQNGRDMYTGEALDIDNLSQYDIDHIVPQAFIKDDSIDNRVLVSSAKNRGKSDNVPSIDIVKARKAFWKKLLDAKLMSQRKYDNLTKAERGGLTSDDKARFIQRQLVETRQITKHVARILDERFNNELDSKGRRIRKVKIVTLKSNLVSNFRKEFGFYKIREVNDYHHAHDAYLNAVVAKAILTKYPQLEPEFVYGDYPKYNSYKTRKSATEKLFFYSNIMNFFKTKVTLADGTVVVKDDIEVNNDTGEIVWDKKKHFATVRKVLSYPQVNIVKKTEIQTGGFSKESILAHGNSDKLIPRKTKDIYLDPKKYGGFDSPIVAYSVLVVADIKKGKAQKLKTVTELLGITIMERFRFEKNPSAFLESKGYLNIRDDKLMILPKYSLFELENGRRRLLASAGELQKGNELALPTQYMKFLYLASRYNELKGKPEEIEQKQEFVVQHVSYFDDILQIINDFSNRVILADANLEKINKLYQDNKENISVDELANNIINLFTFTSLGAPAAFKFFDKIVDRKRYTSTKEVLNSTLIHQSITGLYETRIDLGKLGED

SEQ ID NO: 659 - protein, 1370 aa, Streptococcus agalactiae
  misc_feature (9)..(9): Xaa can be any naturally occurring amino acid
MNKPYSIGXDIGTNSVGWSIITDDYKVPAKKMRVLGNTDKEYIKKNLIGALLFDGGNTAADRRLKRTARRRYTRRRNRILYLQEIFAEEMSKVDDSFFHRLEDSFLVEEDKRGSKYPIFATLQEEKDYHEKFSTIYHLRKELADKKEKADLRLIYIALAHIIKFRGHFLIEDDSFDVRNTDISKQYQDFLEIFNTTFENNDLLSQNVDVEAILTDKISKSAKKDRILAQYPNQKSTGIFAEFLKLIVGNQADFKKYFNLEDKTPLQFAKDSYDEDLENLLGQIGDEFADLFSAAKKLYDSVLLSGILTVIDLSTKAPLSASMIQRYDEHREDLKQLKQFVKASLPEKYQEIFADSSKDGYAGYIEGKTNQEAFYKYLSKLLTKQEDSENFLEKIKNEDFLRKQRTFDNGSIPHQVHLTELKAIIRRQSEYYPFLKENQDRIEKILTFRIPYYIGPLAREKSDFAWMTRKTDDSIRPWNFEDLVDKEKSAEAFIHRMTNNDFYLPEEKVLPKHSLIYEKFTVYNELTKVRYKNEQGETYFFDSNIKQEIFDGVFKEHRKVSKKKLLDFLAKEYEEFRIVDVIGLDKENKAFNASLGTYHDLEKILDKDFLDNPDNESILEDIVQTLTLFEDREMIKKRLENYKDLFTESQLKKLYRRHYTGWGRLSAKLINGIRDKESQKTILDYLIDDGRSNRNFMQLINDDGLSFKSIISKAQAGSHSDNLKEVVGELAGSPAIKKGILQSLKIVDELVKVMGYEPEQIVVEMARENQTTNQGRRNSRQRYKLLDDGVKNLASDLNGNILKEYPTDNQALQNERLFLYYLQNGRDMYTGEALDIDNLSQYDIDHIIPQAFIKDDSIDNRVLVSSAKNRGKSDDVPSLEIVKDCKVFWKKLLDAKLMSQRKYDNLTKAERGGLTSDDKARFIQRQLVETRQITKHVARILDERFNNELDSKGRRIRKVKIVTLKSNLVSNFRKEFGFYKIREVNNYHHAHDAYLNAVVAKAILTKYPQLEPEFVYGDYPKYNSYKTRKSATEKLFFYSNIMNFFKTKVTLADGTVVVKDDIEVNNDTGEIVWDKKKHFATVRKVLSYPQNNIVKKTEIQTGGFSKESILAHGNSDKLIPRKTKDIYLDPKKYGGFDSPIVAYSVLVVADIKKGKAQKLKTVTELLGITIMERSRFEKNPSAFLESKGYLNIRADKLIILPKYSLFELENGRRRLLASAGELQKGNELALPTQFMKFLYLASRYNESKGKPEEIEKKQEFVNQHVSYFDDILQLINDFSKRVILADANLEKINKLYQDNKENISVDELANNIINLFTFTSLGAPAAFKFFDKIVDRKRYTSTKEVLNSTLIHQSITGLYETRIDLGKLGED

SEQ ID NO: 660 - protein, 1125 aa, Streptococcus anginosus
MNGLVLGLDIGIASVGVGILNKETGEIIHANSRIFPAATADSNVERRGFRQGRRLGRRKKHRSARLNNLFEEFGFITDFSAIPLNLNPYALRVKGLSEELTNEELFIALKNIIKRRGISYLDDASEDGETASNEYGKAVEENRKLLADKTPGQIQLERFEKYGQVRGDFTVVENGENHRLINVFSTSAYKKEAERILRRQQEFNVRISDEFIEAYLTILTGKRKYYHGPGNEKSRTDYGRFRTDGTTLDNIFGILIGKCTFYPDEYRAAKASYTAQEFNLLNDLNNLTVPTETKKLSPEQKRQIVEYARTAKTLGTPTLLKYIAKLVDGSIDDIKGYRIDKSDKPEMHTFDAYRKMRTLDLVNIDALSRETLDDLAHILTLNTESEGILEALNSKMPSTFTKEQIDELIQFRKKNSAVFGKGWHNFSLKLMNELISELYETSEEQMTILTRLGKQRSREISKRTKYIDEKELTEEIYNPVVAKSVRQAIKIINEATKRYGIFDNIVIEMARENNEEDAKKDYIKRQKANQDEKNASMEKAAFQYNGKKELPDSIFHGHKELATKIRLWHQQGERCLYTGKNISIRDLIHNPHQYEIDHILPLSLSFDDGLANKVLVLATANQEKGQRTPFQAIDSMDDAWSYREFKQYVRNSKSLSNKKKDYLLTEEDISKIEVKQKFIERNLVDTRYSSRVVLNTLQEFYKTNDFDTKISVVRGQFTSQLRRKWKIEKSRDTYHHHAVDALIIAASSQLRLWKKQNNPLISYKEGQFVDPETGEILSLTDDEYKELVFRPPYDYFVDTLKSKSFEDSILFSYQVDSKYNRKISDATIYGTRKAQLGKDKQEETYVLGKIKDIYSQKGYEDFIKRYNKDETQFLIYHKDPQTFEKVIEEILKTYPDKELNEKGKEIPCNPFEKYRQENGPIRKYSKKGKGPEIKSLKYYDNKLGNHIDITPVNSQNQVVLQSLKPWRTDVYFNPRTSKYELMGLKYSDLRFEKGSGSYGISPEKYNKVKAKEGVNEDSEFKFTLYKNDLILIKDTETGEQQLFRYGSRNDTSKHYVELKPYEKAKFEGNQQLMNLLGTVAKGGQCLKGINKPNLSIYKVKTDVLGNKYFIKKEGDQPQLNFKKKF

SEQ ID NO: 661 - protein, 1386 aa, Streptococcus anginosus
MNQKYSIGLDIGTNSVGWAVITDDYKVPAKKMKVLGNTDKQSIKKNLLGALLFDSGETAEATRLKRTARRRYTRRRNRLRYLQEIFAEEMMQVDESFFQRLDDSFLVDEDKRGERHPIFGNIAAEVKYHDEFPTIYHLRKHLADISQKADLRLVYLALAHMIKFRGHFLIEGQLKAENTNVQALFKDFVEVYDKTVEESHLSEITVDALSILTEKVSKSRRLENLIAHYPAEKKNTLFGNLIALFLGLQPNFKTNFQLSEDAKLQFSKDTYEEDLEGLLGEVGDEYADLFASAKNLYDAILLSGILTVDDNSTKAPLSASMVKRYEEHQKDLKKFEDFIKVNALDQYNAIFKDKNKKGYAGYIESGVKQDEFYKYLKGILLQINGSGDFLDKIDREDFLRKQRTFDNGSIPHQIHLQEMHAILRRQGEHYPFLKENQDKIEKILTFRIPYYVGPLARKGSRFAWAEYKADEKITPWNFDDILDKEKSAEKFITRMTLNDLYLPEEKVLPKHSLLYETFTVYNELTKVKYVNEQGEAKFFDANMKQEIFDHVFKENRKVTKDKLLNYLNKEFEEFRIVNLTGLDKENKVFNSSLGTYHDLRKILNKSFLDNKENAQIIEDIIQTLTLFEDREMIRQRLQKYSDIFTKAQLKKLERRHYTGWGRLSYKLINGIRNKENKKTILDYLIDDGYANRNFMQLINDDALSFKEEIAKAQIIGDVDDIANVVHDLPGSPAIKKGILQSVKIVDELVKVMGHNPANIIIEMARENQTTDRGRRNSQQRLKLLQDSLKNLDNPVNIKNVENQQLQNDRLFLYYIQNGKDMYTGETLDINNLSQYDIDHIIPQAYIKDDSFDNRVLTSSSENRGKSDNVPSIEVVCARKADWMRLRKAGLISQRKFDNLTKAERGGLTENDKAGFIKRQLVETRQITKHVAQVLDARFNAKHDENKKVIRDVKIITLKSNLVSQFRKDFKFYKVREINDYHHAHDAYLNAVIGTALLKKYPKLASEFVYGEFKKYDVRKFIAKSDKEIGKATAKYFFYSNLMNFFKKEVKFADGTVVERPDIETSEDGEIAWNKQTDFKIVRKVLSYPQVNIVKKTEVQTHGLDRGKPRGLFNANPSPKPKPDSSENLVGVKRNLDPKKYGGYAGISNSYAVLVKAIIEKGVKKKETMVLEFQGISILDRITFEKDKRAFLLGKGYKDIKKIIELPKYSLFELKDGSRRMLASILSTNNKRGEIHKGNELFVPQKFTTLLYHAKRINNPINKDHIEYVKKHRDDFKELLNYVLEFNEKYVGATKNGERLKEAVADFDSKSNEEICTSFLGAVNSKNAGLFELTSLGSASDFEFLGVKIPRYRDYTPSSLLKDSTLIHQSITGLYETRIDLSKLGED

SEQ ID NO: 662 - protein, 1396 aa, Streptococcus anginosus
MTKPYSIGLDIGTNSVGWAVITDDYKVPAKKMKVLGNTNRDYIKKNLLGALLFDGGETAEGRRLKRTARRRYTRRKNRLRYLQEIFAEEMMQVDESFFQRLDDSFLVEEDKQGSKYPIFGTLKEEKEYHKKFKTIYHLREELANSKEKADLRLVYLALAHMIKFRGHFLYEGDLKAENTDVQALFKDFVEEYDKTIEESHLSEITVDALSILTEKVSKSSRLENLIAHYPTEKKNTLFGNLIALSLGLQANFKTNFQLSEDAKLQFSKDTYEEDLEGLLGEVGDEYADLFVSAKNLYDAILLSGILTVDDNSTKAPLSASMVKRYKEHKEELAAFKRFIKEKLPKKYEEIFKDDTKNGYAGYVGADKKLRKRSGKLATEEEFYKYVKGILNKVEGADYFLDKIDREDFLRKQRTFDNGSIPHQIHLQEMHAILRRQGEHYPFLKENQDKIEKILTFRIPYYVGPLARKGSRFAWAEYKADEKITPWNFDDILDKEKSAEKFITRMTLNDLYLPEEKVLPKHSPLYETFTVYNELTKVKYVNEQGEAKFFDTNMKQEIFDHVFKENRKVTKDKLLNYLNKEFEEFRIVNLTGLDKENKAFNASLGTYHDLRKILDKSFLDDKVNEKIIEDIIQTLTLFEDREMIRQRLQKYSDIFTTQQLKELERRHYTGWGRLSYKLINGIRNKENKKTILDYLIDDGYANRNFMQLINDDALSFKEEIARAQIIGDVDDIANVVHDLPGSPAIKKGILQSVKIVDELVKVMGHNPTNIIIEMARENQTTDKGRRNSQQRLKLLQDSLKNLDNPVNIKNVENQQLQNDRLFLYYIQNGKDMYTGETLDINNLSQYDIDHIIPQAFIKDNSLDNRVLTRSDKNRGKSDDVPSIEVVHEMKSFWSKLLSVKLITQRKFDNLTKAERGGLTENDKAGFIKRQLVETRQITKHVAQVLDARFNAKHDENKKVIRDVKIITLKSNLVSQFRKDFKFYKVREINDYHHAHDAYLNAVIGTALLKKYPKLASEFVYGEFKKYDVRKFIAKSDKEIGKATAKYFFYSNLMNFFKKEVKFADGTVVERPDIETSEDGEIAWNKQTDFKIVRKVLSYPQVNIVKKTEVQTHGLDRGKPRGLFNANPSPKPKPDSSENLVGIKRNLDPKKYGGYAGISNSYAVLVKAIIEKGVKKKETMVLEFQGISILDRITFEKDKRAFLLGKGYKDIKKIIELPKYSLFELKDGSRRMLASILSTNNKRGEIHKGNELFVPQKFTTLLYHAKRINNPINKDHIEYVKKHRDDFKELLNYVLEFNEKYVGATKNGERLKEAVADFDSKSNEEICTSFLGAVNSKNAGLFELTSLGSASDFEFLGVKIPRYRDYTPSSLLKDSILIHQSITGLYETRIDLSKLGED

SEQ ID NO: 663 - protein, 1375 aa, Streptococcus canis
MEKKYSIGLDIGTNSVGWAVITDDYKVPSKKFKVLGNTNRKSIKKNLMGALLFDSGETAEATRLKRTARRRYTRRKNRIRYLQEIFANEMAKLDDSFFQRLEESFLVEEDKKNERHPIFGNLADEVAYHRNYPTIYHLRKKLADSPEKADLRLIYLALAHIIKFRGHFLIEGKLNAENSDVAKLFYQLIQTYNQLFEESPLDEIEVDAKGILSARLSKSKRLEKLIAVFPNEKKNGLFGNIIALALGLTPNFKSNFDLTEDAKLQLSKDTYDDDLDELLGQIGDQYADLFSAAKNLSDAILLSDILRSNSEVTKAPLSASMVKRYDEHHQDLALLKTLVRQQFPEKYAEIFKDDTKNGYAGYVGIGIKHRKRTTKLATQEEFYKFIKPILEKMDGAEELLAKLNRDDLLRKQRTFDNGSIPHQIHLKELHAILRRQEEFYPFLKENREKIEKILTFRIPYYVGPLARGNSRFAWLTRKSEEAITPWNFEEVVDKGASAQSFIERMTNFDEQLPNKKVLPKHSLLYEYFTVYNELTKVKYVTERMRKPEFLSGEQKKAIVDLLFKTNRKVTVKQLKEDYFKKIECFDSVEIIGVEDRFNASLGTYHDLLKIIKDKDFLDNEENEDILEDIVLTLTLFEDREMIEERLKTYAHLFDDKVMKQLKRRHYTGWGRLSRKMINGIRDKQSGKTILDFLKSDGFSNRNFMQLIHDDSLTFKEEIEKAQVSGQGDSLHEQIADLAGSPAIKKGILQTVKIVDELVKVMGHKPENIVIEMARENQTTTKGLQQSRERKKRIEEGIKELESQILKENPVENTQLQNEKLYLYYLQNGRDMYVDQELDINRLSDYDVDHIVPQSFIKDDSIDNKVLTRSVENRGKSDNVPSEEVVKKMKNYWRQLLNAKLITQRKFDNLTKAERGGLSEADKAGFIKRQLVETRQITKHVARILDSRMNTKRDKNDKPIREVKVITLKSKLVSDFRKDFQLYKVRDINNYHHAHDAYLNAVVGTALIKKYPKLESEFVYGDYKVYDVRKMIAKSEQEIGKATAKRFFYSNIMNFFKTEVKLANGEIRKRPLIETNGETGEVVWNKEKDFATVRKVLAMPQVNIVKKTEVQTGGFSKESILSKRESAKLIPRKKGWDTRKYGGFGSPTVAYSILVVAKVEKGKAKKLKSVKVLVGITIMEKGSYEKDPIGFLEAKGYKDIKKELIFKLPKYSLFELENGRRRMLASATELQKANELVLPQHLVRLLYYTQNISATTGSNNLGYIEQHREEFKEIFEKIIDFSEKYILKNKVNSNLKSSFDEQFAVSDSILLSNSFVSLLKYTSFGASGGFTFLDLDVKQGRLRYQTVTEVLDATLIYQSITGLYETRTDLSQLGGD

SEQ ID NO: 664 - protein, 1345 aa, Streptococcus constellatus
MGKPYSIGLDIGTNSVGWAVVTDDYKVPAKKMKVLGNTDKQSIKKNLLGALLFDSGETAEATRLKRTARRRYTRRKNRLRYLQEIFTGEMNKVDENFFQRLDDSFLVDEDKRGEHHPIFGNIAAEVKYHDDFPTIYHLRRHLADTSKKADLRLVYLALAHMIKFRGHFLYEGDLKAENTDVQALFKDFVEEYDKTIEESHLSEITVDALSILTEKVSKSSRLENLIAHYPTEKKNTLFGNLIALSLDLHPNFKTNFQLSEDAKLQFSKDTYEEDLEGFLGEVGDEYADLFASAKNLYDAILLSGILTVDDNSTKAPLSASMVKRYEEHQKDLKKLKDFIKVNAPDQYNAIFKDKNKKGYASYIESGVKQDEFYKYLKGILLKINGSGDFLDKIDREDFLRKQRTFDNGSIPHQIHLQEMHAILRRQGEHYPFLKENQDKIEKILTFRIPYYVGPLARKGSRFAWAEYKADEKITPWNFDDILDKEKSAEKFITRMTLNDLYLPEEKVLPKHSPLYEAFTVYNELTKVKYVNEQGEAKFFDTNMKQEIFDHVFKENRKVTKDKLLNYLNKEFEEFRIVNLTGLDKENKAFNSSLGTYHDLRKILDKSFLDDKANEKTIEDIIQTLTLFEDREMIRQRLQKYSDIFTKAQLKKLERRHYTGWGRLSYKLINGIRNKENKKTILDYLIDDGYANRNFMQLINDDALSFKEEIARAQIIDDVDDIANVVHDLPGSPAIKKGILQSVKIVDELVKVMGHNPANIIIEMARENQTTDKGRRNSQQRLKLLQDSLKNLDNPVNIKNVENQQLQNDRLFLYYIQNGKDMYTGETLDINNLSQYDIDHIIPQAFIKDNSLDNRVLTRSDKNRGKSDDVPSIEVVHEMKSFWSKLLSVKLITQRKFDNLTKAERGGLTEEDKAGFIKRQLVETRQITKHVAQILDERFNTEFDGNKRRIRNVKIITLKSNLVSNFRKEFELYKVREINDYHHAHDAYLNAVVGNALLLKYPQLEPEFVYGEYPKYNSYRSRKSATEKFLFYSNILRFFKKEDIQTNEDGEIAWNKEKHIKILRKVLSYPQVNIVKKTEEQTGGFSKESILPKGESDKLIPRKTKNSYWDPKKYGGFDSPVVAYSILVFADVEKGKSKKLRKVQDMVGITIMEKKRFEKNPVDFLEQRGYRNVRLEKIIKLPKYSLFELENKRRRLLASAKELQKGNELVIPQRFTTLLYHSYRIEKDYEPEHREYVEKHKDEFKELLEYISVFSRKYVLADNNLTKIEMLFSKNKDAEVSSLAKSFISLLTFTAFGAPAAFNFFGENIDRKRYTSVTECLNATLIHQSITGLYETRIDLSKLGED

SEQ ID NO: 665 - protein, 538 aa, Streptococcus dysgalactiae
DYDVDHIVPQSFIKDDSIDNKVLTRSDKNRGKSDNVPSEEVVKKMKNYWRQLLNAKLITQRKFDNLTKAERGGLSELDKAGFIKRQLVETRQITKHVAQILDSRMNTKYDENDKLIREVKVITLKSKLVSDFRKDFQFYKVREINNYHHAHDAYLNAVVGTALIKKYPKLESEFVYGDYKVYDVRKMIAKSEQEIGKATAKRFFYSNIMNFFKTEITLANGEIRKRPLIETNEETGEIVWDKGRDFATVRKVLSMPQVNIVKKTEVQTGALTNESIYARGSFDKLISRKHRFESSKYGGFGSPTVTYSVLVVAKSKVQDGKVKKIKTGKELIGITLLDKLVFEKNPLKFIEDKGYGNVQIDKCIRLPKYSLFEFENGTRRMLASVMANNNSRGDLQKANEMFLPAKLVTLLYHAHKIESSKELEHEAYILDHYNDLYQLLSYIERFASLYVDVEKNISKVKELFSNIESYSISEICSSVINLLTLTASGAPADFKFLGTTIPRKRYGSPQSILSSTLIHQSITGLYETRIDLSQLGGD

SEQ ID NO: 666 - protein, 1155 aa, Streptococcus dysgalactiae
MDKKYSIGLDIGTNSVGWAVITDDYKVPSKKFKVLGNTDRHSIKKNLIGALLFDSGETAEATRLKRSARRRYTRRKNRIRYLQEIFSSEMSKVDDSFFHRLEESFLVEEDKKHERHPIFGNIVDEVAYHEKYPTIYHLRKKLADSTDKADLRLIYLALAHMIKFRGHFLIEGDLNPDNSDMDKLFIQLVQTYNQLFEENPINASRVDAKAILSARLSKSRRLENLIAQLPGEKRNGLFGNLIALSLGLTPNFKSNFDLAEDAKLQLSKDTYDDDLDNLLAQIGDQYADLFLAAKNLSDAILLSDILRVNSEITKAPLSASMIKRYDEHHQDLTLLKALVRQQLPEKYKEIFFDQSKNGYAGYIDGGASQEEFYKFIKPILEKMDGTEELLAKLNREDLLRKQRTFDNGSIPHQIHLGELHAILRRQEDFYPFLKDNREKIEKILTFRIPYYVGPLARGNSRFAWMTRKSEETITPWNFEEVVDKGASAQSFIERMTNFDKNLPNEKVLPKHSLLYEYFTVYNELTKVKYVTEGMRKPEFLSGKQKEAIVDLLFKTNRKVTVKQLKEDYFKKIECFDSVEISGVEDRFNASLGTYHDLLKIIKDKDFLDNEENEDILEDIVLTLTLFEDKEMIEERLKTYAHLFDDKVMKQLKRRHYTGWGRLSRKLINGIRDKQSGKTILDFLKSDGFANRNFIQLIHDDSLTFKEAIQKAQVSGQGHSLHEQIANLAGSPAIKKGILQSVKVVDELVKVMGHKPENIVIEMARENQTTQKGQKNSRERMKRIEEGIKELGSQILKEHPVENTQLQNEKLYLYYLQNRRDMYVDQELDINRLSDYDVDHIVPQSFIKDDSIDNKVLTRSDKNRGKSDDVPSEEVVKKMKNYWRQLLNAKLITQRKFDNLTKAERGGLSELDKAGFIKRQLVETRQITKHVAQILDSRMNTKYDENDKLIREVKVITLKSKLVSDFRKDFQFYKVREINNYHHAHDAYLNAVVGTALIKKYPKLESEFVYGDYKVYDVRKMIAKSEQEIGKATAKRFFYSNIMNFFKTEITLANGEIRKRPLIETNEETGEIVWDKGRDFATVRKVLSMPQVNIVKKTEVQTGALTNESIYARGSFDKLISRKHRFESSKYGGFGSPTVTYSVLVVAKYQSYKMEK

SEQ ID NO: 667 - protein, 1371 aa, Streptococcus dysgalactiae
MDKKYSIGLDIGTNSVGWAVITDDYKVPSKKFKVLGNTDRHSIKKNLIGALLFDSGETAEATRLKRTARRRYTRRKNRIRYLQEIFSSEMSKVDDSFFHRLEESFLVEEDKKHERHPIFGNIVDEVAYHEKYPTIYHLRKKLADSTDKADLRLIYLALAHMIKFRGHFLIEGDLNPDNSDMDKLFIQLVQTYNQLFEENPINASRVDAKAILSARLSKSRRLENLIAQLPGEKRNGLFGNLIALSLGLTPNFKSNFDLAEDAKLQLSKDTYDDDLDNLLAQIGDQYADLFLAAKNLSDAILLSDILRVNSEITKAPLSASMIKRYDEHHQDLTLLKALVRQQLPEKYKEIFFDQSKNGYAGYIDGGASQEEFYKFIKPILEKMDGTEELLAKLNREDLLRKQRTFDNGSIPHQIHLGELHAILRRQEDFYPFLKDNREKIEKILTFRIPYYVGPLARGNSRFAWMTRKSEETITPWNFEEVVDKGASAQSFIERMTNFDKNLPNEKVLPKHSLLYEYFTVYNELTKVKYVTEGMRKPEFLSGKQKEAIVDLLFKTNRKVTVKQLKEDYFKKIECFDSVEISGVEDRFNASLGTYHDLLKIIKDKDFLDNEENEDILEDIVLTLTLFEDKEMIEERLKTYAHLFDDKVMKQLKRRHYTGWGRLSRKLINGIRDKQSGKTILDFLKSDGFANRNFIQLIHDDSLTFKEAIQKAQVSGQGHSLHEQIANLAGSPAIKKGILQSVKVVDELVKVMGHKPENIVIEMARENQTTQKGQKNSRERMKRIEEGIKELGSQILKEHPVENTQLQNEKLYLYYLQNGRDMYVDQELDINRLSDYDVDHIVPQSFIKDDSIDNKVLTRSDKNRGKSDDVPSEEVVKKMKNYWRQLLNAKLITQRKFDNLTKAERGGLSELDKAGFIKRQLVETRQITKHVAQILDSRMNTKYDENDKLIREVKVITLKSKLVSDFRKDFQFYKVREINNYHHAHDAYLNAVVGTALIKKYPKLESEFVYGDYKVYDVRKMIAKSEQEIGKATAKRFFYSNIMNFFKTEITLANGEIRKRPLIETNEETGEIVWNKGRDFATVRKVLSMPQVNIVKKTEVQTGALTNESIYARGSFDKLISRKHRFESSKYGGFGSPTVTYSVLVVAKSKVQDGKVKKIKTGKELIGITLLDKLVFEKNPLKFIEDKGYGNVQIDKCIKLPKYSLFEFENGTRRMLASVMANNNSRGDLQKANEMFLPAKLVTLLYHAHKIESSKELEHEAYILDHYNDLYQLLSYIERFASLYVDVEKNISKVKELFSNIESYSISEICSSVINLLTLTASGAPADFKFLGTTIPRKRYGSPQSILSSTLIHQSITGLYETRIDLSQLGGD

SEQ ID NO: 668 - protein, 1371 aa, Streptococcus dysgalactiae
MDKKYSIGLDIGTNSVGWAVITDDYKVPSKKFKVLGNTDRHSIKKNLIGALLFDSGETAEATRLKRTARRRYTRRKNRIRYLQEIFSSEMSKVDDSFFHRLEESFLVEEDKKHERHPIFGNIVDEVAYHEKYPTIYHLRKKLADSTDKADLRLIYLALAHMIKFRGHFLIEGDLNPDNSDMDKLFIQLVQTYNQLFEENPINASRVDAKAILSARLSKSRRLENLIAQLPGEKRNGLFGNLIALSLGLTPNFKSNFDLAEDAKLQLSKDTYDDDLDNLLAQIGDQYADLFLAAKNLSDAILLSDILRVNSEITKAPLSASMIKRYDEHHQDLTLLKALVRQQLPEKYKEIFFDQSKNGYAGYIDGGASQEEFYKFIKPILEKMDGTEELLAKLNREDLLRKQRTFDNGSIPHQIHLGELHAILRRQEDFYPFLKDNREKIEKILTFRIPYYVGPLARGNSRFAWMTRKSEETITPWNFEEVVDKGASAQSFIERMTNFDKNLPNEKVLPKHSLLYEYFTVYNELTKVKYVTEGMRKPEFLSGKQKEAIVDLLFKTNRKVTVKQLKEDYFKKIECFDSVEISGVEDRFNASLGTYHDLLKIIKDKDFLDNEENEDILEDIVLTLTLFEDKEMIEERLKKYANLFDDKVMKQLKRRHYTGWGRLSRKLINGIRDKQSGKTILDFLKSDGFANRNFMQLINDDSLTFKEAIQKAQVSGQGHSLHEQIANLAGSPAIKKGILQSVKVVDELVKVMGHKPENIVIEMARENQTTQKGQKNSRERMKRIEEGIKELGSQILKEHPVENTQLQNEKLYLYYLQNGRDMYVDQELDINRLSDYDVDHIVPQSFIKDDSIDNKVLTRSDKNRGKSDNVPSEEVVKKMKNYWRQLLNAKLITQRKFDNLTKAERGGLSELDKAGFIKRQLVETRQITKHVAQILDSRMNTKYDENDKLIREVKVITLKSKLVSDFRKDFQFYKVREINNYHHAHDAYLNAVVGTALIKKYPKLESEFVYGDYKVYDVRKMIAKSEQEIGKATAKRFFYSNIMNFFKTEITLANGEIRKRPLIETNEETGEIVWDKGRDFATVRKVLSMPQVNIVKKTEVQTGALTNESIYARGSFDKLISRKHRFESSKYGGFGSPTVTYSVLVVAKSKVQDGKVKKIKTGKELIGITLLDKLVFEKNPLKFIEDKGYGNVQIDKCIKLPKYSLFEFENGTRRMLASVMANNNSRGDLQKANEMFLPAKLVTLLYHAHKIESSKELEHEAYILDHYNDLYQLLSYIERFASLYVDVEKNISKVKELFSNIESYSISEICSSVINLLTLTASGAPADFKFLGTTIPRKRYGSPQSILSSTLIHQSITGLYETRIDLSQLGGD

SEQ ID NO: 669 - protein, 1371 aa, Streptococcus dysgalactiae
MDKKYSIGLDIGTNSVGWAVITDDYKVPSKKFKVLGNTDRHSIKKNLIGALLFDSGETAEATRLKRTARRRYTRRKNRIRYLQEIFSSEMSKVDDSFFHRLEESFLVEEDKKHERHPIFGNIVDEVAYHEKYPTIYHLRKKLADSTDKADLRLIYLALAHMIKFRGHFLIEGDLNPDNSDVDKLFIQLVQTYNQLFEEKPINASGVDAKAILSARLSKSKRLENLIAQLPGEKKNGLFGNLIALSLGLTPNFKSNFDLAEDAKLQLSKDTYDDDLDNLLAQIGNQYADLFLAAKNLSDAILLSDILRVNSEITKAPLSASMIKRYDEHHQDLTLLKALVRQQLPEKYKEIFFDQSKNGYAGYIDGGASQEEFYKFIKPILEKMDGTEELLAKLNREDLLRKQRTFDNGSIPHQIHLGELHAILRRQEDFYPFLKDNREKIEKILTFRIPYYVGPLARGNSRFAWMTRKSEETITPWNFEEVVDKGASAQSFIERMTNFDKNLPNEKVLPKHSLLYEYFTVYNELTKVKYVTEGMRKPEFLSGKQKEAIVDLLFKTNRKVTVKQLKEDYFKKIECFDSVEISGVEDRFNASLGTYHDLLKIIKDKDFLDNEENEDILEDIVLTLTLFEDKEMIEERLKKYANLFDDKVMKQLKRRHYTGWGRLSRKLINGIRDKQSGKTILDFLKSDGFANRNFMQLINDDSLTFKEAIQKAQVSGQGHSLHEQIANLAGSPAIKKGILQSVKVVDELVKVMGHKPENIVIEMARENQTTQKGQKNSRERMKRIEEGIKELGSQILKEHPVENTQLQNEKLYLYYLQNGRDMYVDQELDINRLSDYDVDHIVPQSFIKDDSIDNKVLTRSDKNRGKSDNVPSEEVVKKMKNYWRQLLNAKLITQRKFDNLTKAERGGLSELDKAGFIKRQLVETRQITKHVAQILDSRMNTKYDENDKLIREVKVITLKSKLVSDFRKDFQFYKVREINNYHHAHDAYLNAVVGTALIKKYPKLESEFVYGDYKVYDVRKMIAKSEQEIGKATAKRFFYSNIMNFFKTEITLANGEIRKRPLIETNEETGEIVWDKGRDFATVRKVLSMPQVNIVKKTEVQTGALTNESIYARGSFDKLISRKHRFESSKYGGFGSPTVTYSVLVVAKSKVQDGKVKKIKTGKELIGITLLDKLVFEKNPLKFIEDKGYGNVQIDKCIKLPKYSLFEFENGTRRMLASVMANNNSRGDLQKANEMFLPAKLVTLLYHAHKIESSKELEHEAYILDHYNDLYQLLSYIERFASLYVDVEKNISKVKELFSNIESYSISEICSSVINLLTLTASGAPADFKFLGTTIPRKRYGSPQSILSSTLIHQSITGLYETRIDLSQLGGD

SEQ ID NO: 670 - protein, 1370 aa, Streptococcus gallolyticus; identical to SEQ ID NO: 218

SEQ ID NO: 671 - protein, 1375 aa, Streptococcus infantarius
MEKSYSIGLDIGTNSVGWAVITDDYKVPAKKMKVLGNTDKKYIKKNLLGALLFDSGETAEVTRLKRTARRRYTRRKNRLRYLQEIFAKEMTKVDESFFQRLEESFLTDDDKTFDSHPIFGNKAEEDAYHQKFPTIYHLRKYLADSQEKADLRLVYLALAHMIKYRGHFLIEGELNAENTDVQKLFNVFVETYDKIVDESHLSEIEVDASSILTEKVSKSRRLENLIKQYPTEKKNTLFGNLIALALGLQPNFKTNFKLSEDAKLQFSKDTYEEDLEELLGKVGDDYADLFISAKNLYDAILLSGILTVDDNSTKAPLSASMIKRYVEHHEDLEKLKEFIKINKLKLYHDIFKDKTKNGYAGYIDNGVKQDEFYKYLKTILTKIDDSDYFLDKIERDDFLRKQRTFDNGSIPHQIHLQEMHSILRRQGDYYPFLKENQAKIEKILTFRIPYYVGPLARKDSRFAWANYHSDEPITPWNFDEVVDKEKSAEKFITRMTLNDLYLPEEKVLPKHSHVYETFTVYNELTKIKYVNEQGESFFFDANMKQEIFDHVFKENRKVTKAKLLSYLNNEFEEFRINDLIGLDKDSKSFNASLGTYHDLKKILDKSFLDDKTNGQIIEDIVLTLTLFEDRDMIHERLQKYSDFFTSQQLKKLERRHYTGWGRLSYKLINGIRNKENNKTILDFLIDDGHANRNFMQLINDESLSFKTIIQEAQVVGDVDDIEAVVHDLPGSPAIKKGILQSVKIVDELVKVMGDNPDNIVIEMARENQTTGYGRNKSNQRLKRLQDSLKEFGSDILSKKKPSYVDSKVENSHLQNDRLFLYYIQNGKDMYTGEELDIDRLSDYDIDHIIPQAFIKDNSIDNKVLTSSAKNRGKSDDVPSIEIVRNRRSYWYKLYKSGLISKRKFDNLTKAERGGLTEADKAGFIKRQLVETRQITKHVAQILDARFNTKRDENDKVIRDVKVITLKSNLVSQFRKEFKFYKVREINDYHHAHDAYLNAVVGTALLKKYPKLTPEFVYGEYKKYDVRKLIAKSSDDYSEMGKATAKYFFYSNLMNFFKTEVKYADGRVFERPDIETNADGEVVWNKQKDFDIVRKVLSYPQVNIVKKVEAQTGGFSKESILSKGDSDKLIPRKTKKVYWNTKKYGGFDSPTVAYSVLVVADIEKGKAKKLKTVKELVGISIMERSFFEENPVSFLEKKGYHNVQEDKLIKLPKYSLFEFEGGRRRLLASATELQKGNEVMLPAHLVELLYHAHRIDSFNSTEHLKYVSEHKKEFEKVLSCVENFSNLYVDVEKNLSKVRAAAESMTNFSLEEISASFINLLTLTALGAPADFNFLGEKIPRKRYTSTKECLSATLIHQSVTGLYETRIDLSKLGEE

SEQ ID NO: 672 - protein, 1368 aa, Streptococcus iniae
MRKPYSIGLDIGTNSVGWAVITDDYKVPSKKMRIQGTTDRTSIKKNLIGALLFDNGETAEATRLKRTTRRRYTRRKYRIKELQKIFSSEMNELDIAFFPRLSESFLVSDDKEFENHPIFGNLKDEITYHNDYPTIYHLRQTLADSDQKADLRLIYLALAHIIKFRGHFLIEGNLDSENTDVHVLFLNLVNIYNNLFEEDIVETASIDAEKILTSKTSKSRRLENLIAEIPNQKRNMLFGNLVSLALGLTPNFKTNFELLEDAKLQISKDSYEEDLDNLLAQIGDQYADLFIAAKKLSDAILLSDIITVKGASTKAPLSASMVQRYEEHQQDLALLKNLVKKQIPEKYKEIFDNKEKNGYAGYIDGKTSQEEFYKYIKPILLKLDGTEKLISKLEREDFLRKQRTFDNGSIPHQIHLNELKAIIRRQEKFYPFLKENQKKIEKLFTFKIPYYVGPLANGQSSFAWLKRQSNESITPWNFEEVVDQEASARAFIERMTNFDTYLPEEKVLPKHSPLYEMFMVYNELTKVKYQTEGMKRPVFLSSEDKEEIVNLLFKKERKVTVKQLKEEYFSKMKCFHTVTILGVEDRFNASLGTYHDLLKIFKDKAFLDDEANQDILEEIVWTLTLFEDQAMIERRLVKYADVFEKSVLKKLKKRHYTGWGRLSQKLINGIKDKQTGKTILGFLKDDGVANRNFMQLINDSSLDFAKIIKNEQEKTIKNESLEETIANLAGSPAIKKGILQSIKIVDEIVKIMGQNPDNIVIEMARENQSTMQGIKNSRQRLRKLEEVHKNTGSKILKEYNVSNTQLQSDRLYLYLLQDGKDMYTGKELDYDNLSQYDIDHIIPQSFIKDNSIDNTVLTTQASNRGKSDNVPNIETVNKMKSFWYKQLKSGAISQRKFDHLTKAERGALSDFDKAGFIKRQLVETRQITKHVAQILDSRFNSNLTEDSKSNRNVKIITLKSKMVSDFRKDFGFYKLREVNDYHHAQDAYLNAVVGTALLKKYPKLEAEFVYGDYKHYDLAKLMIQPDSSLGKATTRMFFYSNLMNFFKKEIKLADDTIFTRPQIEVNTETGEIVWDKVKDMQTIRKVMSYPQVNIVMKTEVQTGGFSKESIWPKGDSDKLIARKKSWDPKKYGGFDSPIIAYSVLVVAKIAKGKTQKLKTIKELVGIKIMEQDEFEKDPIAFLEKKGYQDIQTSSIIKLPKYSLFELENGRKRLLASAKELQKGNELALPNKYVKFLYLASHYTKFTGKEEDREKKRSYVESHLYYFDEIMQIIVEYSNRYILADSNLIKIQNLYKEKDNFSIEEQAINMLNLFTFTDLGAPSAFKFFNGDIDRKRYSSTNEIINSTLIYQSPTGLYETRIDLSKLGGK

SEQ ID NO: 673 - protein, 1392 aa, Streptococcus mitis
MNNNNYSIGLDIGTNSVGWAVITDDYKVPSKKMKVLGNTDKHFIKKNLIGALLFDEGATAEDRRFKRTARRRYTRRKNRLRYLQEIFSEEMSKVDSSFFHRLDDSFLVPEDKRGSKYPIFATLAEEKEYHKKFPTIYHLRKHLADSKEKTDLRLIYLALAHMIKYRGHFLYEESFDIKNNDIQKIFSEFISIYDNTFEGSSLSGQNAQVEAIFTDKISKSAKRERILKLFAYEKSTDLFSEFLKLIVGNQADFKKHFDLEEKAPLQFSKDTYDEDLENLLGQIGDDFADLFLVAKKLYDAILLSGILTVTDSSTKAPLSASMIERYENHQKDLAALKQFIQNNLQEKYDEVFSDQSKDGYARYINGKTTQEAFYKYIKNLLSKFEGSDYFLDKIEREDFLRKQRTFDNGSIPHQIHLQEMNAIIRRQGEHYPFLKEYKEKIETILTFRIPYYVGPLARGNRNFAWLTRNSDQAIRPWNFEEIVDQASSAEEFINKMTNYDLYLPEEKVLPKHSLLYETFAVYNELTKVKFISEGLRDYQFLDSGQKKQIVNQLFKEKRKVTEKDIIQYLHNVDGYDGIELKGIEKQFNASLSTYHDLLKIIKDKEFMDDPKNEEILENIVHTLTIFEDREMIKQRLAQYASIFDKKVIKALTRRHYTGWGKLSAKLINGICDKKTGKTILDYLIDDGYSNRNFMQLINDDGLSFKDIIQKAQVVGKTNDVKQVVQELPGSPAIKKGILQSIKLVDELVKVMGHAPESIVIEIARENQTTARGKKNSQQRYKRIEDALKNLAPGLDSNILKEHPTDNIQLQNDRLFLYYLQNGKDMYTGEALDINQLSSYDIDHIVPQAFIKDDSLDNRVLTSSKDNRGKSDNVPSLEVVQKRKAFWQQLLDSKLISEHKFNNLTKAERGGLDERDKVGFIRRQLVETRQITKHVAQILDARFNTEVNEKDKKNRTVKIITLKSNLVSNFRKEFKLYKVREINDYHHAHDAYLNAVVAKAILKKYPKLEPGFVYGDYQKYDIKRYISRSKDPKEVEKATEKYFFYSNLLNFFKEEVHYADGTIVKRENIEYSKDTGEIAWNKEKDFATIKKVLSLPQVNIVKKTEIQTHGLDRGKPRGLFNSNPSPKPSEDRKENLVPIKQGLDPRKYGGYAGISNSYAVLVKAIIEKGAKKQQKTVLEFQGISILDKINFEKNKENYLLEKGYIKILSTITLPKYSLFEFPDGTRRRLASILSTNNKRGEIHKGNELVIPEKYTTLLYHAKNINKTLEPEHLEYVEKHRNDFAKLLEYVLNFNDKYVGALKNGERIRQAFIDWETVDIEKLCFSFIGPRNSKNAGLFELTSQGSASDFEFLGVKIPRYRDYTPSSLLNATLIHQSITGLYETRIDLSKLGED

SEQ ID NO: 674 - protein, 1134 aa, Streptococcus mutans
MANGKILGLDIGIASVGVGIIDKETGKIIHVNSRIFPAATADSNVERRGFRQGRRLVRRKKHRKVRLADLFLDSNLLTDFSKVSLNLNPYQLRVKGLNEELSNEELFIALKSIVSRRGISYLDDASEDSGANSSEYGKAVEENRKLLEDRTPGQIQLERFEKYGKVRGDFTVVENGENHRLINVFSTSAYKKEAERILRRQQEFNMRIADEFIEAYLTILTGKRKYYHGPGNEKSRTDYGRFRTDGTTLDNIFGILIGKCTFYPDEYRAAKASYTAQEFNLLNDLNNLTVPTETKKLSEEQKRQIIEHAKTVKTLGAPTLLKYIVKLVGCSADDIKGYRIDKSDKPEIHTFEAYRKMRTMELIKVDDLSRESLDALAHILTLNTEREGIEEAIRDRFTNKEFNQEQINELVLFRKNNSSLFGKGWHNFSLKLMKELIPELYETSEEQMTILTRLGKQRVKKSSNRTNYIDEKELTEEIYNPVVAKSVRQAIKIINLATKKYGVFDNIVIEMARESNEDDEKKAIQNAQKANEDEKKAALLKAAHQFNGKEELPDSIFHGHKELLTKIRLWHQQGEKCLYTGKTIFINDLIHNPYKYEIDHILPLSLSFDDSLANKVLVLSTANQEKGQRTPFQSLDSMDGAWTYREFKSYVKGLKTLSNKKKDYLLTEENIDKIEVKQKFIERNLVDTRYSSRVVLNALQDFYKERKFDTKISVVRGQFTSQLRRKWRIEKTRETYHHHAVDALIIAASSQLNLWKKQNNPLISYKEDQFVDPETGEILSLSDDEYKKLVFKAPYEHFVDTLKSKKFEDSILFSYQVDSKYNRKISGATICGTRKAQLGKDTQEETYVLGKIKDIYSQKGYEDFIKKYKKDKTQFLMYHKDPQTFEKVIEEILKTYPDKELNEKGKEVSCNPFEKYRQENGPVRKYSKKGNGPEIKSLKYYDEVLGKNIDITPKNSLNKVVLRSLNPWRTDVYFNHETRKYEFLGLKYSDLRYLKGEHRYGILIGDYKKIKDKEGIEKESEFKFTLYKNDLILIKDTAKGKEELFRFWSRTGKDNAKTFEKNKIELKPYSKSQFEKGEDTNVLGKLYASSNQLQKSFGTLENLSIYKVRTDVLGNKYFIKKEGDKPQLNFKKKL

SEQ ID NO: 675 - protein, 1134 aa, Streptococcus mutans; identical to SEQ ID NO: 674

SEQ ID NO: 676 - protein, 1128 aa, Streptococcus mutans
MANSKILGLDIGIASVGVGIIDKETGKIIHVNSRIFPAATADSNVERRGFRQGRRLVRRKKHRKVRLADLFLDSNLLTDFSKVSLNLNPYQLRVKGLNEELSNEELFIALKSIVSRRGISYLDDASEDSGANSSEYGKAVEENRKLLEDRTPGQIQLERFEKYGKVRGDFTVVENGENHRLINVFSTSAYKKEAERILRRQQEFNIRIADEFIEAYLTILTGKRKYYHGPGNEKSRTDYGRFRTDGTTLDNIFGILIGKCTFYPDEYRAAKASYTAQEFNLLNDLNNLTVPTETKKLSEEQKRQIIEHAKTVKTLGAPTLLKYIAKLVGCSADDIKGYRIDKSDKPEIHTFEAYRKMRTMELIKVADLSRESLDALAHILTLNTEREGIEEAIRDRFTNKEFNQEQINELVLFRKNNSSLFGKGWHNFSLKLMKELIPELYETSEEQMTILTRLGKQRVKKSSNRTNYIDEKELTEEIYNPVVAKSVRQAIKIINLATKKYGVFDNIVIEMARESNEDDEKKAIQNAQKANEDEKEAALLKAAHQFNGKEELPDSIFHGHKELLTKIRLWHQQGEKCLYTGKTIFINDLIHNPYKYEIDHILPLSLSFDDSLANKVLVLSTANQEKGQRTPFQSLDSMDGAWTYREFKAYVKGLKTLSNKKKDYLLNEEDINKNEVKQKFIERNLVDTRYSSRVVLNTLQDFYKKREFDTKISVVRGQFTSQIRRKWRIEKTRETYHHHAVDALIIAASSQLNLWKKQNNPLISYKEDQFVDPETGEILSLSDDEYKELVFKAPYDHFVDTLKSKKFEDSILFSYQVDSKYNRKISDATIYGTRKARLGKDSQEETYVLGKIKDIYSQKGYEDFIKKYKKDKTQFLMYHKDPQTFEKVIEEILKTYSDKELNEKGKEVPCNPFEKYRQENGPVRKYSKKGNGPEIKSIKYYDNKLGNHIDITPNNSHHQVVLQSLKPWRTDVYFNPKSGKYELMGLKYSDLRFEKVSGDYGISVKKYNEIKSKEGVDENSEFKFTLYKNDLILIKDTESGEQELFRFLSRTMPNQKHYVELKPYDKSKFEGHQKLMDIFGEVAKGGQCLKGLNKSNISIYKVKTDVLGNKYFIKKEGDQPQLNFKKKI

SEQ ID NO: 677 - protein, 1128 aa, Streptococcus mutans; identical to SEQ ID NO: 676

SEQ ID NO: 678 - protein, 1338 aa, Streptococcus mutans
MDLIGTNSVGWAVVTDDYKVPAKKMKVLGNTDKSHIKKNLLGALLFDSGNTAADRRLKRTARRRYTRRRNRILYLQEIFAEEMSKVDDSFFHRLEDSFLVTEDKRGERHPIFGNLEEEVKYHENFPTIYHLRQYLADNPEKVDLRLVYLALAHIIKFRGHFLIEGKFDTRNNDVQRLFQEFLAVYDNTFENSSLQEQNVQVEEILTDKISKSAKKDRVLKLFPNEKSNGRFAEFLKLIVGNQADFKKHFELEEKAPLQFSKDTYEEELEVLLAQIGDNYAELFLSAKKLYDSILLSGILTVTDVSTKAPLSASMIQRYNEHQMDLAQLKQFIRQKLSDKYNEVFSDVSKDGYAGYIDGKTNQEAFYKYLKGLLNKIEGSGYFLDKIEREDFLRKQRTFDNGSIPHQIHLQEMRAIIRRQAEFYPFLADNQDRIEKILTFRIPYYVGPLARGKSDFAWLSRKSADKITPWNFDEIVDKESSAEAFINRMTNYDLYLPNQKVLPKHSLLYEKFTVYNELTKVKYKTEQGKTAFFDANMKQEIFDGVFKVYRKVTKDKLMDFLEKEFDEFRIVDLTGLDKENKAFNASYGTYHDLRKILDKDFLDNSKNEKILEDIVLTLTLFEDREMIRKRLENYSDLLTKEQVKKLERRHYTGWGRLSAELIHGIRNKESRKTILDYLIDDGNSNRNFMQLINDDALSFKEEIAKAQVIGETDNLNQVVSDIAGSPAIKKGILQSLKIVDELVKIMGHQPENIVVEMARENQFTNQGRRNSQQRLKGLTDSIKEFGSQILKEHPVEHSQLQNDRLFLYYLQNGRDMYTGEELDIDYLSQYDIDHIIPQAFIKDNSIDNRVLTSSKENRGKSDDVPSKNVVRKMKSYWSKLLSAKLITQRKFDNLTKAERGGLTDDDKAGFIKRQLVETRQITKHVARILDERFHTETDENNKKIRQVKIVTLKSNLVSNFRKEFELYKVREINDYHHAHDAYLNAVIGKALLGVYPQLEPEFVYGDYPHFHGHKENKATAKKFFYSNIMNFFKKDDVRTDKNGEIIWKKDEHISNIKKVLSYPQVNIVKKVEEQTGGFSKESILPKGNSDKLIPRKTKKFYWDTKKYGGFDSPIVAYSILVIADIEKGKSKKLKTVKALVGVTIMEKMTFERDPVAFLERKGYRNVQEENIIKLPKYSLFKLENGRKRLLASARELQKGNEIVLPNHLGTLLYHAKNIHKVDEPKHLDYVDKHKDEFKELLDVVSNFSKKYTLAEGNLEKIKELYAQNNGEDLKELASSFINLLTFTAIGAPATFKFFDKNIDRKRYTSTTEILNATLIHQSITGLYETRIDLSKLGGD

SEQ ID NO: 679 - protein, 1338 aa, Streptococcus mutans; identical to SEQ ID NO: 678

SEQ ID NO: 680 - protein, 1345 aa, Streptococcus mutans
MKKPYSIGLDIGTNSVGWAVVTDDYKVPAKKMKVLGNTDKSHIEKNLLGALLFDSGNTAEDRRLKRTARRRYTRRRNRILYLQEIFSEEMGKVDDSFFHRLEDFFLVTEDKRGERHPIFGNLEEEVKYHENFPTIYHLRQYLADNPEKVDLRLVYLALAHIIKFRGHFLIEGKFDTRNNDVQRLFQEFLAVYDNTFENSSLQEQNVQVEEILTDKISKSAKKDRVLKLFPNEKSNGRFAEFLKLIVGNQADFKKHFELEEKAPLQFSKDTYEEELEVLLAQIGDNYAELFLSAKKLYDSILLSGILTADDSSTKAPLSASMIQRYNEHQMDLAQLKQFIRQKLSDKYNEVFSDVSKDGYAGYIDGKTNQEAFYKYLKGLLNKIEGSGYFLDKIEREDFLRKQRTFDNGSIPHQIHLQEMRAIIRRQSEFYPFLADNQDRIEKILTFRIPYYVGPLARGKSDFAWLSRKSADKITPWNFDEIVDKESSAEAFINRMTNYDLYLPNQKVLPKHSLLYEKFTVYNELTKVKYKTEQGETAFFDANMKQEIFDGVFKVYRKVTKDKLMDFLEKEFDEFRIVDLTGLDKENKAFNASYGTYHDLRKILDKDFLDNSKNEKILEDIVLTLTLFEDREMIRKRLKNYSDLLTKEQLKKLERRHYTGWGRLSAELIHGIRNKESRKTILDYLIDDGNSNRNFMQLINDDALSFKEEIAKAQVIGETDNLNQVVSDIAGSPAIKKGILQSLKIVDELVKIMGHQPENIVVEMARENQFTNQGRRNSQQRLKGLTDSIKEFGSQILKEHPVENSQLQNDRLFLYYLQNGRDMYTGEELDIDYLSQYDIDHIIPQAFIKDNSIDNRVLTSSKENRGKSDDVPSKDVVRKMKPYWSKLLSAKLITQRKFDNLTKAERGGLTDDDKAGFIKRQLVETRQITKHVARILDERFNTETDENNKKIRQVKIVTLKSNLVSNFRKEFELYKVREINDYHHAHDAYLNAVIGKALLGVYPQLEPEFVYGDYPHFHGHEENKATAKKFFYSNIMNFFKKDDVRTDKNGEIIWKKDEHISNIKKVLSYPQVNIVKKVEEQTGGFSKESILPKGNSDKLIPRKTKKFYWDTKKYGGFDSPIVAYSILVIADIEKGKSKKLKTVKALVGVTIMEKMTFERDPVAFLERKGYRNVQEENIIKLPKYSLFKLENGRKRLLASARELQKGNEIVLPNHLGTLLYHAKNIHKVDEPKHLDYVDKHKDEFKELLDVVSNFSKKYTLAEGNLEKIKELYAQNNGEDLKELASSFINLLTFTAIGAPATFKFFDKNIDRKRYTSTTEILNATLIHQSITGLYETRIDLSKLGGD

SEQ ID NO: 681 - protein, 1345 aa, Streptococcus mutans; identical to SEQ ID NO: 680

SEQ ID NO: 682 - protein, 1229 aa, Streptococcus mutans
MKKPYSIGLDIGTNSVGWAVVTDDYKVPAKKMKVLGNTDKSHIEKNLLGALLFDSGNTAEDRRLKRTARRRYTRRRNRILYLQEIFSEEMGKVDDSFFHRLEDSFLVTEDKRGERHPIFGNLEEEVKYHENFPTIYHLRQYLADNPEKVDLRLVYLALAHIIKFRGHFLIEGKFDTRNNDVQRLFQEFLAVYDNTFENSSLQEQNIQVEEILTDKISKSAKKDRVLKLFPNEKSNGRFAEFLKLIVGNQADFKKHFELEEKAPLQFSKDTYEEELEVLLAQIGDNYAELFLSAKKLYDSILLSGILTVTDVGTKAPLSASMIQRYNEHQMDLTQLKQFIRQKLSDKYNEVFSDVSKDGYAGYIDGKTNQEAFYKYLKGLLNKIEGSGYFLDKIEREDFLRKQRTFDNGSIPHQIHLQEMRAIIRRQAEFYPFLADNQDRIEKILTFRIPYYVGPLARGKSDFAWLSRKSADKITPWNFDEIVDKESSAEAFINRMTNYDLYLPNQKVLPKHSLLYEKFTVYNELTKVKYKTEQGKTAFFDANMKQEIFDGVFKVYRKVTKDKLMDFLEKEFDEFRIVDLTGLDKENKVFNASYGTYHDLCKILDKDFLDNSKNEKILEDIVLTLTLFEDREMIRKRLENYSDLLTKEQVKKLERRHYTGWGRLSAELIHGIRNKESRKTILDYLIDDGNSNRNFMQLINDDALSFKEEIAKAQVIGETDNLNQVVSDIAGSPAIKKGILQSLKIVDELVKIMGHQPENIVVEMARENQFTNQGRRNSQQRLKGLTDSIKEFGSQILKEHPVENSQLQNDRLFLYYLQNGRDMYTGEELDIDYLSQYDIDHIIPQAFIKDNSIDNRVLTSSKENRGKSDDVPSKDVVRKMKPYWSKLLSAKLITQRKFDNLTKAERGGLTDDDKAGFIKRQLVETRQITKHVARILDERFNTETDENNKKIRQVKIVTLKSNLVSNFRKEFELYKVREINDYHHAHDAYLNAVIGKALLGVYPQLEPEFVYGDYPHFHGHEENKATAKKFFYSNIMNFFKKDDVRTDKNGEIIWKKDEHISNIKKVLSYPQVNIVKKVEEQTIGQNGGLFDDNPKSPLEVIPSKLVPLKKALNPEKYGGYQKPTTAYPILLIVDTKQLIPISVMDKKRFEQNPVKFLKDKGYQQIEKNNFVKLPKYTLVDIGNGIKRLWASSKEVHKGNQLVVSKKSQDLLYHAHHLDNDYSNEYVKNHY

SEQ ID NO: 683 - protein, 1229 aa, Streptococcus mutans; identical to SEQ ID NO: 682

SEQ ID NO: 684 - protein, 1345 aa, Streptococcus mutans
MKKPYSIGLDIGTNSVGWAVVTDDYKVPAKKMKVLGNTDKSHIEKNLLGALLFDSGNTAEDRRLKRTARRRYTRRRNRILYLQEIFSEEMGKVDDSFFHRLEDSFLVTEDKRGERHPIFGNLEEEVKYHENFPTIYHLRQYLADNPEKVDLRLVYLALAHIIKFRGHFLIEGKFDTRNNDVQRLFQEFLAVYDNTFENSSLQEQNVQVEEILTDKISKSAKKDRVLKLFPNEKSNGRFAEFLKLIVGNQADFKKHFELEEKAPLQFSKDTYEEELEVLLAQIGDNYAELFLSAKKLYDSILLSGILTVTDVGTKAPLSASMIQRYNEHQMDLAQLKQFIRQKLSDKYNEVFSDVSKDGYAGYIDGKTNQEAFYKYLKGLLNKIEGSGYFLDKIEREDFLRKQRTFDNGSIPHQIHLQEMRAIIRRQAEFYPFLADNQDRIEKLLTFRIPYYVGPLARGKSDFAWLSRKSADKITPWNFDEIVDKESSAEAFINRMTNYDLYLPNQKVLPKHSLLYEKFTVYNELIKVKYKTEQGKTAFFDANMKQEIFDGVFKVYRKVTKDKLMDFLEKEFDEFRIVDLTGLDKENKVFNASYGTYHDLCKILDKDFLDNSKNEKILEDIVLTLTLFEDREMIRKRLENYSDLLTKEQVKKLERRHYTGWGRLSAELIHGIRNKESRKTILDYLIDDGNSNRNFMQLINDDALSFKEEIAKAQVIGETDNLNQVVSDIAGSPAIKKGILQSLKIVDELVKIMGHQPENIVVEMARENQFTNQGRRNSQQRLKGLTDSIKEFGSQILKEHPVENSQLQNDRLFLYYLQNGRDMYTGEELDIDYLSQYDIDHIIPQAFIKDNSIDNRVLTSSKENRGKSDDVPSKDVVRKMKSYWSKLLSAKLITQRKFDNLTKAERGGLTDDDKAGFIKRQLVETRQITKHVARILDERFNTETDENNKKIRQVKIVTLKSNLVSNFRKEFELYKVREINDYHHAHDAYLNAVIGKALLGVYPQLEPEFVYGDYPHFHGHKENKATAKKFFYSNIMNFFKKDDVRTDKNGEIIWKKDEHISNIKKVLSYPQVNIVKKVEEQTGGFSKESILPKGNSDKLIPRKTKKFYWDTKKYGGFDSPIVAYSILVIADIEKGKSKKLKTVKALVGVTIMEKMTFERDPVAFLERKGYRNVQEENIIKLPKYSLFKLENGRKRLLASARELQKGNEIVLPNHLGTLLYHAKNIHKVDEPKHLDYVDKHKDEFKELLDVVSNFSKKYTLAEGNLEKIKELYAQNNGEDLKELASSFINLLTFTAIGAPATFKFFDKNIDRKRYTSTTEILNATLIHQSITGLYETRIDLNKLGGD

SEQ ID NO: 685 - protein, 1350 aa, Streptococcus mutans
MKKPYSIGLDIGTNSVGWAVVTDDYKVPAKKMKVLGNTDKSHIEKNLLGALLFDSGNTAEDRRLKRTARRRYTRRRNRILYLQEIFSEEMGKVDDSFFHRLEDSFLVTEDKRGERHPIFGNLEEEVKYHENFPTIYHLRQYLADNPEKVDLRLVYLALAHIIKFRGHFLIEGKFDTRNNDVQRLFQEFLAVYDNTFENSSLQEQNVQVEEILTDKISKSAKKDRVLKLFPNEKSNGRFAEFLKLIVGNQADFKKHFELEEKAPLQFSKDTYEEELEVLLAQIGDNYAELFLSAKKLYDSILLSGILTVTDVSTKAPLSASMIQRYNEHQMDLTQLKQFIRQKLSDKYNEVFSDVSKDGYAGYIDGKTNQEAFYKYLKGLLNKIEGSGYFLDKIEREDFLRKQRTFDNGSIPHQIHLQEMRAIIRRQAEFYSFLADNQDRIEKILTFRIPYYVGPLARGKSDFAWLSRKSADKITPWNFDEIVDKESSAEAFINRMTNYDLYLPNQKVLPKHSLLYEKFTVYNELTKVKYKTEQGKTAFFDANMKQEIFDGVFKVYRKVTKDKLMDFLEKEFDEFRIVDLTGLDKENKAFNASYGTYHDLRKILDKDFLDNSKNEKILEDIVLTLTLFEDREMIRKRLENYSDLLTKEQVKKLERRHYTGWGRLSAELIHGIRNKESRKTILDYLIDDGNSNRNFMQLINDDALSFKEEIAKAQVIGETDNLNQVVSDIAGSPAIKKGILQSLKIVDELVKIMGHQPENIVVEMARENQFTNQGRRNSQQRLKGLTDSIKEFGSQILKEHPVENSQLQNDRLFLYYLQNGRDMYTGEELDIDYLSQYDIDHIIPQAFIKDNSIDNRVLTSSKENRGKSDDVPSEDVVNRMRPFWNKLLSSGLISQRKYNNLTKKELTLDDKAGFIKRQLVETRQITKHVARMLDERFNKEFDDNNKRIRKVKIVTLKSNLVSSFRKEFELYKVREINDYHHAHDAYLNAVVVKALLVKYSKLEPEFVYGEYPKYNSYRERKTATQKMFFYSNIMNMFKSKVKLADDQIVERPMIEVNDETGEIAWDKTKHITTVKKVLSYPQVNIVKKVEEQTIGQNGGLFDDNPKSPLEVIPSKLVPLKKALNPEKYGGYQKPTTAYPILLIVDTKQLIPISVMDKKRFEQNPVKFLKDKGYQQIEKNNFVKLPKYTLVDIGNGIKRLWASSKEVHKGNQLVVSKKSQDLLYHAHHLDNDYSNEYVKNHYQQFDILFNEITSFSKKCKLGKEHIQKIEEAYSKERDSASIEELADGFIKLLGFTQLGATSPFSFLGIKLNQKQYTGKKDYLLPCMEATLIHQSITGLYETRIDLSKLGGD

SEQ ID NO: 686 - protein, 1350 aa, Streptococcus mutans
MKKPYSIGLDIGTNSVGWAVVTDDYKVPAKKMKVLGNTDKSHIEKNLLGALLFDSGNTAEDRRLKRTARRRYTRRRNRILYLQEIFSEEMGKVDDSFFHRLEDSFLVTEDKRGERHPIFGNLEEEVKYHENFPTIYHLRQYLADNPEKVDLRLVYLALAHIIKFRGHFLIEGKFDTRNNDVQRLFQEFLAVYDNTFENSSLQEQNVQVEEILTDKISKSAKKDRVLKLFPNEKSNGRFAEFLKLIVGNQADFKKHFELEEKAPLQFSKDTYEEELEVLLAQIGDNYAELFLSAKKLYDSILLSGILTVTDVSTKAPLSASMIQRYNEHQMDLTQLKQFIRQKLSDKYNEVFSDVSKDGYAGYIDGKTNQEAFYKYLKGLLNKIEGSGYFLDKIEREDFLRKQRTFDNGSIPHQIHLQEMRAIIRRQAEFYPFLADNQDRIEKILTFRIPYYVGPLARGKSDFAWLSRKSADKITPWNFDEIVDKESSAEAFINRMTNYDLYLPNQKVLPKHSLLYEKFTVYNELTKVKYKTEQGKTAFFDANMKQEIFDGVFKVYRKVTKDKLMDFLEKEFDEFRIVDLTGLDKENKAFNASYGTYHDLRKILDKDFLDNSKNEKILEDIVLTLTLFEDREMIRKRLKNYSDLLTKEQLKKLERRHYTGWGRLSAELIHGIRNKESRKTILDYLIDDGNSNRNFMQLINDDALSFKEEIAKAQVIGETDNLNQVVSDIAGSPAIKKGILQSLKIVDELVKIMGHQPENIVVEMARENQFTNQGRQNSQQRLKGLTDSIKEFGSQILKEHPVENSQLQNDRLFLYYLQNGRDMYTGEELDIDYLSQYDIDHIIPQAFIKDNSIDNRVLTSSKENRGKSDDVPSEDVVNRMRPFWNKLLSSGLISQRKYNNLTKKELTLDDKAGFIKRQLVETRQITKHVARMLDERFNKEFDDNNKRICKVKIVTLKSNLVSSFRKEFELYKVREINDYHHAHDAYLNAVVVKALLVKYSKLEPEFVYGEYPKYNSYRERKTATQKMFFYSNIMNMFKSKVKLADDQIVERPMIEVNDETGEIAWDKTKHITTVKKVLSYPQVNIVKKVEEQTIGQNGGLFDDNPKSPLEVIPSKLVPLKKALNPEKYGGYQKPTTAYPILLIVDTKQLIPISVMDKKRFEQNPVKFLKDKGYQQIEKNNFVKLPKYTLVDIGNGIKRLWASSKEVHKGNQLVVSKKSQDLLYHAHHLDNDYSNEYVKNHYQQFDILFNEITSFSKKCKLGKEHIQKIEEAYSKERDSASIEELADGFIKLLGFTQLGATSPFSFLGIKLNQKQYTGKKDYLLPCMEATLIHQSITGLYETRIDLSKLGGD

SEQ ID NO: 687 - protein, 1345 aa, Streptococcus mutans; identical to SEQ ID NO: 684

SEQ ID NO: 688 - protein, 1350 aa, Streptococcus mutans; identical to SEQ ID NO: 685

SEQ ID NO: 689 - protein, 1350 aa, Streptococcus mutans; identical to SEQ ID NO: 686

SEQ ID NO: 690 - protein, 1345 aa, Streptococcus mutans
MKKPYSIGLDIGTNSVGWAVVTDDYKVPAKKMKVLGNTDKSHIKKNLLGALLFDSGNTAADRRLKRTARRRYTRRRNRILYLQEIFAEEMSKVDDSFFHRLEDSFLVTEDKRGERHPIFGNLEEEVKYHENFPTIYHLRQYLADNPEKVDLRLVYLALAHIIKFRGHFLIEGKFDTRNNDVQRLFQEFLAVYDNTFENSSLQEQNVQVEEILTDKISKSAKKDRVLKLFPNEKSNGRFAEFLKLIVGNQADFKKHFELEEKAPLQFSKDTYEEELEVLLTQIGDNYAELFLSAKKLYDSILLSGILTVTDVSTKAPLSASMIQRYNEHQMDLAQLKQFIRQKLSDKYNEVFSDVSKDGYAGYIDGKTNQEAFYKYLKGLLNKIEGSGYFLDKIEREDFLRKQRTFDNGSIPHQIHLQEMRAIIRRQAEFYPFLADNQDRIEKILTFRIPYYVGPLARGKSDFAWLSRKSADKITPWNFDEIVDKESSAEAFINRMTNYDLYLPNQKVLPKHSLLYEKFTVYNELTKVKYKTEQGKTAFFDANMKQEIFDGVFKVYRKVTKDKLMDFLEKEFDEFRIVDLTGLDKENKAFNASYGTYHDLRKILDKDFLDNSKNEKILEDIVLTLTLFEDREMIRKRLENYSDLLTKEQVKKLERRHYTGWGRLSAELIHGIRNKESRKTLLDYLIDDGNSNRNFMQLINDDALSFKEEIAKAQVIGETDNLNQVVSDIAGSPAIKKGILQSLKIVDELVKIMGHQPENIVVEMARENQFTNQGRRNSQQRLKGLTDSIKEFGSQILKEHPVENSQLQNDRLFLYYLQNGRDMYTGEELDIDYLSQYDIDHIIPQAFIKDNSIDNRVLTSSKENRGKSDDVPSKDVVRKMKPYWSKLLSAKLITQRKFDNLTKAERGGLTDDDKAGFIKRQLVETRQITKHVARILDERFNTETDENNKKIRQVKIVTLKSNLVSNFRKEFELYKVREINDYHHAHDAYLNAVIGKALLGVYPQLEPEFVYGDYPHFHGHEENKATAKKFFYSNIMNFFKKDDVRTDKNGEIIWKKDEHISNIKKVLSYPQVNIVKKVEEQTGGFSKESILPKGNSDKLIPRKTKKFYWDTKKYGGFDSPIVAYSILVIADIEKGKSKKLKTVKALVGVTIMEKMTFERDPVAFLERKGYRNVQEENIIKLPKYSLFKLENGRKRLLASARELQKGNEIVLPNHLGTLLYHAKNIHKVDEPKHLDYVDKHKDEFKELLDVVSNFSKKYTLAEGNLEKIKELYAQNNGEDLKELSSSFINLLTFTAIGAPAAFKFFDKNIDRKRYTSTTEILNATLIHQSITGLYETRIDLSKLGGD

SEQ ID NO: 691 - protein, 1345 aa, Streptococcus mutans
MKKPYSIGLDIGTNSVGWAVVTDDYKVPAKKMKVLGNTDKSHIKKNLLGALLFDSGNTAADRRLKRTARRRYTRRRNRILYLQEIFAEEMSKVDDSFFHRLEDSFLVTEDKRGERHPIFGNLEEEVKYHENFPTIYHLRQYLADNPEKVDLRLVYLALAHIIKFRGHFLIEGKFDTRNNDVQRLFQEFLAVYDNTFENSSLQEQNVQVEEILTDKISKSAKKDRVLKLFPNEKSNGRFAEFLKLIVGNQADFKKHFELEEKAPLQFSKDTYEEELEVLLAQIGDNYAELFLSAKKLYDSILLSGILTVTDVSTKAPLSASMIQRYNEHQMDLAQLKQFIRQKLSDKYNEVFSDVSKDGYAGYIDGKTNQEAFYKYLKGLLNKIEGSGYFLDKIEREDFLRKQRTFDNGSIPHQIHLQEMRAIIRRQAEFYPFLADNQDRIEKILTFRIPYYVGPLARGKSDFAWLSRKSADKITPWNFDEIVDKESSAEAFINRMTNYDLYLPNQKVLPKHSLLYEKFTVYNELTKVKYKTEQGKTAFFDANMKQEIFDGVFKVYRKVTKDKLMDFLEKEFDEFRIVDLTGLDKENKAFNASYGTYHDLRKILDKDFLDNSKNEKILEDIVLTLTLFEDREMIRKRLENYSDLLTKEQVKKLERRHYTGWGRLSAELIHGIRNKESRKTILDYLIDDGNSNRNFMQLINDDALSFKEEIAKAQVIGETDNLNQVVSDIAGSPAIKKGILQSLKIVDELVKIMGHQPENIVVEMARENQFTNQGRRNSQQRLKGLTDSIKEFGSQILKEHPVEHSQLQNDRLFLYYLQNGRDMYTGEELDIDYLSQYDIDHIIPQAFIKDNSIDNRVLTSSKENRGKSDDVPSKNVVRKMKSYWSKLLSAKLITQRKFDNLTKAERGGLTDDDKAGFIKRQLVETRQITKHVARILDERFHTETDENNKKIRQVKIVTLKSNLVSNFRKEFELYKVREINDYHHAHDAYLNAVIGKALLGVYPQLEPEFVYGDYPHFHGHKENKATAKKFFYSNIMNFFKKDDVRTDKNGEIIWKKDEHISNIKKVLSYPQVNIVKKVEEQTGGFSKESILPKGNSDKLIPRKTKKFYWDTKKYGGFDSPIVAYSILVIADIEKGKSKKLKTVKALVGVTIMEKMTFERDPVAFLERKGYRNVQEENIIKLPKYSLFKLENGRKRLLASARELQKGNEIVLPNHLGTLLYHAKNIHKVDEPKHLDYVDKHKDEFKELLDVVSNFSKKYTLAEGNLEKIKELYAQNNGEDLKELASSFINLLTFTAIGAPATFKFFDKNIDRKRYTSTTEILNATLIHQSITGLYETRIDLSKLGGD

SEQ ID NO: 692 - protein, 1345 aa, Streptococcus mutans
MKKPYSIGLDIGTNSVGWAVVTDDYKVPAKKMKVLGNTDKSHIKKNLLGALLFDSGNTAADRRLKRTARRRYTRRRNRILYLQEIFAEEMSKVDDSFFHRLEDSFLVTEDKRGERHPIFGNLEEEVKYHENFPTIYHLRQYLADNPEKVDLRLVYLALAHIIKFRGHFLIEGKFDTRNNDVQRLFQEFLAVYDNTFENSSLQEQNVQVEEILTDKISKSAKKDRVLKLFPNEKSNGRFAEFLKLIVGNQADFKKHFELEEKAPLQFSKDTYEEELEVLLAQIGDNYAELFLSAKKLYDSILLSGILTVTDVSTKAPLSASMIQRYNEHQMDLAQLKQFIRQKLSDKYNEVFSDVSKDGYAGYIDGKTNQEAFYKYLKGLLNKIEGSGYFLDKIEREDFLRKQRTFDNGSIPHQIHLQEMRAIIRRQAEFYPFLADNQDRIEKILTFRIPYYVGPLARGKSDFAWLSRKSADKITPWNFDEIVDKESSAEAFINRMTNYDLYLPNQKVLPKHSLLYEKFTVYNELTKVKYKTEQGKTAFFDANMKQEIFDGVFKVYRKVTKDKLMDFLEKEFDEFRIVDLTGLDKENKVFNASYGTYHDLCKILDKDFLDNSKNEKILEDIVLTLTLFEDREMIRKRLENYSDLLTKEQVKKLERRHYTGWGRLSAELIHGIRNKESRKTILDYLIDDGNSNRNFMQLINDDALSFKEEIAKAQVIGETDNLNQVVSDIAGSPAIKKGILQSLKIVDELVKIMGHQPENIVVEMARENQFTKQGRRNSQQRLKGLTDSIKEFGSQILKEHPVENSQLQNDRLFLYYLQNGRDMYTGEELDIDYLSQYDIDHIIPQAFIKDNSIDNRVLTSSKENRGKSDDVPSKDVVRKMKSYWSKLLSAKLITQRKFDNLTKAERGGLTDDDKAGFIKRQLVETRQITKHVARILDERFYTETDENNKKIRQVKIVTLKSNLVSNFRKEFELYKVREINDYHHAHDAYLNAVIGKALLGVYPQLEPEFVYGDYPHFHGHKENKATAKKFFYSNIMNFFKKDDVRTDKNGEIIWKKDEHISNIKKVLSYPQVNIVKKVEEQTGGFSKESILPKGNSDKLIPRKTKKFYWDTKKYGGFDSPIVAYSILVIADIEKGKSKKLKTVKALVGVTIMEKMTFERDPVAFLERKGYRNVQEENIIKLPKYSLFKLENGRKRLLASARELQKGNEIVLPNHLGTLLYHAKNIHKVDEPKHLDYVDKHKDEFKELLDVVSNFSKKYTLAEGNLEKIKELYAQNNGEDLKELASSFINLLTFTAIGAPATFKFFDKNIDRKRYTSTTEILNATLIHQSITGLYETRIDLSKLGGD

SEQ ID NO: 693 - protein, 1345 aa, Streptococcus mutans
MKKPYSIGLDIGTNSVGWAVVTDDYKVPAKKMKVLGNTDKSHIKKNLLGALLFDSGNTAADRRLKRTARRRYTRRRNRILYLQEIFAEEMSKVDDSFFHRLEDSFLVTEDKRGERHPIFGNLEEEVKYHENFPTIYHLRQYLADNPEKVDLRLVYLALAHIIKFRGHFLIEGKFDTRNNDVQRLFQEFLAVYDNTFENSSLQEQNVQVEEILTDKISKSAKKDRVLKLFPNEKSNGRFAEFLKLIVGNQADFKKHFELEEKAPLQFSKDTYEEELEVLLAQIGDNYAELFLSAKKLYDSILLSGILTVTDVSTKAPLSASMIQRYNEHQMDLAQLKQFIRQKLSDKYNEVFSDVSKDGYAGYIDGKTNQEAFYKYLKGLLNKIEGSGYFLDKIEREDFLRKQRTFDNGSIPHQIHLQEMRAIIRRQAEFYPFLADNQDRIEKILTFRIPYYVGPLARGKSDFAWLSRKSADKITPWNFDEIVDKESSAEAFINRMTNYDLYLPNQKVLPKHSLLYEKFTVYNELTKVKYKTEQGKTAFFDANMKQEIFDGVFKVYRKVTKDKLMDFLEKEFDEFRIVDLTGLDKENKAFNASYGTYHDLRKILDKDFLDNSKNEKILEDIVLTLTLFEDREMIRKRLENYSDLLTKEQVKKLERRHYTGWGRLSAELIHGIRNKESRKTILDYLIDDGNSNRNFMQLINDDALSFKEEIAKAQVIGETDNLNQVVSDIAGSPAIKKGILQSLKIVDELVKIMGHQPENIVVEMARENQFTNQGRRNSQQRLKGLTDSIKEFGSQILKEHPVENSQLQNDRLFLYYLQNGRDMYTGEELDIDYLSQYDIDHIIPQAFIKDNSIDNRVLTSSKENRGKSDDVPSKNVVRKMKSYWSKLLSAKLITQRKFDNLTKAERGGLTDDDKAGFIKRQLVETRQITKHVARILDERFHTETDENNKKIRQVKIVTLKSNLVSNFRKEFELYKVREINDYHHAHDAYLNAVIGKALLGVYPQLEPEFVYGDYPHFHGHKENKATAKKFFYSNIMNFFKKDDVRTDKNGEIIWKKDEHISNIKKVLSYPQVNIVKKVEEQTGGFSKESILPKGNSDKLIPRKTKKFYWDTKKYGGFDSPIVAYSILVIADIEKGKSKKLKTVKALVGVTIMEKMTFERDPVAFLERKGYRNVQEENIIKLPKYSLFKLENGRKRLLASARELQKGNEIVLPNHLGTLLYHAKNIHKVDEPKHLDYVDKHKDEFKELLDVVSNFSKKYTLAEGNLEKIKELYAQNNGEDLKELSSSFINLLTFTAIGAPAAFKFFDKNIDRKRYTSTTEILNATLIHQSITGLYETRIDLSKLGGD

SEQ ID NO: 694 - protein, 1345 aa, Streptococcus mutans; identical to SEQ ID NO: 690

SEQ ID NO: 695 - protein, 1345 aa, Streptococcus mutans; identical to SEQ ID NO: 691

SEQ ID NO: 696 - protein, 1345 aa, Streptococcus mutans; identical to SEQ ID NO: 692

SEQ ID NO: 697 - protein, 1345 aa, Streptococcus mutans; identical to SEQ ID NO: 693

SEQ ID NO: 698 - protein, 1345 aa, Streptococcus mutans; identical to SEQ ID NO: 691

SEQ ID NO: 699 - protein, 1345 aa, Streptococcus mutans; identical to SEQ ID NO: 691

SEQ ID NO: 700 - protein, 1345 aa, Streptococcus mutans; identical to SEQ ID NO: 691

SEQ ID NO: 701 - protein, 1345 aa, Streptococcus mutans; identical to SEQ ID NO: 691

SEQ ID NO: 702 - protein, 1359 aa, Streptococcus mutans
MKKPYSIGLDIGTNSVGWAVVTDDYKVPAKKMKVLGNTDKSHIKKNLLGALLFDSGNTAEDRRLKRTARRRYTRRRNRILYLQEIFAEEMMQVDESFFQRLDDSFLVEEDKRGSRYPIFGTLKEEKKYHKEFKTIYHLREKLANSTEKADLRLVYLSLAHMIKFRGHFLIEGQLKAENTNVQALFKDFVEVYDKTVEESHLSEMTVDALSILTEKVSKSRRLENLVECYPTEKKNTLFGNLIALSLGLQPNFKTNFQLSEDAKLQFSKDTYEEDLEGLLGEIGDEYADLFASAKNLYDAILLSGILAVDDNTTKAPLSASMVKRYKEHKEELAAFKRFIKEKLPKKYEEIFKDDTKNGYAGYVGADKKLRKRSGKLATEEEFYKYVKGILNKVEGADVWLDKIDREDFLRKQRTFDNGSIPHQIHLQEMHAILRRQGEHYPFLKENQDKIEKILTFRIPYYVGPLVRKGSRFAWAEYKADEKITPWNFDDILDKEKSAEKFITRMTLNDLYLPEEKVLPKHSLLYETFTVYNELTKVKYVNEQGEAKFFDANMKQEIFDHVFKENRKVTKDKLLNYLNKEFEEFRIVNLTGLDKENKVFNSSLGTYHDLRKILNKSFLDNKENEQIIEDIIQTLTLFEDREMIRQRLQKYSDIFTKAQLKKLERRHYTGWGRLSYKLINGIRDKQSNKTILGYLIDDGYSNRNFMQLINDDALSFKEEIAKAQVIGEMDGLNQVVSDIAGSPAIKKGILQSLKIVDELVKVMGHNPANIVIEMARENQTTAKGRRSSQKRYKRLEEAIKNLDHDLNHKILKEHPTDNQALQNDRLFLYYLQNGRDMYTEDPLDINRLSDYDIDHIIPQAFIKDNSIDNRVLTRSDKNRGKSDDVPSEEVVHKMKPFWSKLLSAKLITQRKFDNLTKAERGGLTDDDKAGFIKRQLVETRQITKHVARILDERFNTETDENNKKIRQVKIVTLKSNLVSNFRKEFELYKVREINDYHHAHDAYLNAVIGKALLGVYPQLEPEFVYGDYPHFHGHKENKATAKKFFYSNIMNFFKKGDVRTDKNGEIIWKKDEHISNIKKVLSYPQVNIVKKVEEQTGGFSKESILPKGNSDKLIPRKTKKFYWDTKKYGGFDSPIVAYSILVIADIEKGKSKKLKTVKALVGVTIMEKMTFERDPVAFLERKGYRNVQEENIIKLPKYSLFKLENGRKRLLASARELQKGNEIVLPNHLETLLYHAKNIHKVDEPKHLDYVDKHKDEFKELLDVVSNFSKKYTLAEGNLEKIKELYAQNNGEDLKELASSFINLLTFTAIGAPAAFKFFDKNIDRKRYTSTTEILNATLIHQSITGLYETRIDLNKLGGD

SEQ ID NO: 703 - protein, 1359 aa, Streptococcus mutans; identical to SEQ ID NO: 702

SEQ ID NO: 704 - protein, 1355 aa, Streptococcus mutans
MKKPYSIGLDIGTNSVGWAVVTDDYKVPAKKMKVLGNTDKSHIKKNLLGALLFDSGNTAEDRRLKRTARRRYTRRRNRILYLQEIFAEEMSKVDDSFFHRLDESFLTDDDKNFDSHPIFGNKAEEDAYHQKFPTIYHLRKHLADSTEKADLRLVYLALAHMIKFRGHFLIEGELNAENTDVQKLFADFVGVYDRTFDDSHLSEITVDASSILTEKISKSRRLEKLINNYPKEKKNTLFGNLIALSLGLQPNFKTNFKLSEDAKLQFSKDTYEEDLEELLGKIGDDYADLFTLAKNLYDAILLSGILTADDSSTKAPLSASMIKRYAEHHEDLEKLKEFIKANKPELYHDIFKDETKNGYAGYIENGVKQDEFYKYLKNTLSKITGSDYFLDQIEREDFLRKQRTFDNGSIPHQIHLQEMHAILRRQGDYYPFLKENQDRIEKILTFRIPYYVGPLARKNSRFAWAEYHSDEAVTPWNFDQVIDKESSAQAFIEHMTNNDLYLPNEKVLPKHSPLYEKYTVYNELTKIKYVTEIGEAKFFDANLKQEIFDGLFKHERKVTKKKLRTFLDKNFDEFRIVDIQGLDKETETFNASYATYQDLLKVIKDKVFMDNPENAEILENIVLTLTLFEDREMIKQRLAKYADVFDKKVIDQLARRHYTGWGRLSAKLLNGIRDKQSCKTIMDYLIDDAQSNRNLMQLITDDNLTFKDDIVKAQYVDNSDDLHQVVQSLAGSPAIKKGILQSLKIVDELVKVMGKEPEQIVVEMARENQTTAKGRRNSQQRYKRLKEAIKSLDRDLNHKILKEHPTDNQALQNNRLFLYYLQNGRDMYTGESLDINRLSDYDIDHVIPQAFIKDNSIDNRVLTSSKANRGKSDDVPSEDVVNRMRPFWNKLLSSGLISQRKYNNLTKKELTLDDKAGFIKRQLVETRQITKHVARMLDERFNKEFDDNNKRIRRVKIVTLKSNLVSSFRKEFELYKVREINDYHHAHDAYLNAVVVKALLVKYPKLEPEFVYGEYPKYNSYRERKTATQKMFFYSNIMNMFKSKVKLADDQIVERPMIEVNDETGEIAWDKTKHITTVKKVLSYPQVNIVKKVEEQTIGQNGGLFDDNPKSPLEVIPSKLVPLKKALNPEKYGGYQKPTTAYPILLIVDTKQLIPISVMDKKRFEQNPVKFLKDKGYQQIEKNNFVKLPKYTLVDIGNGIKRLWASSKEVHKGNQLVVSKKSQDLLYHAHHLDNDYSNEYVKNHYQQFDILFNEITSFSKKCKLGKEHIQKIEEAYSKERDFASIEELADGFIKLLGFTQLGATSPFSFLGIKLNQKQYTGKKDYLLPCMEATLIHQSITGLYETRIDLSKLGGD

SEQ ID NO: 705 - protein, 1355 aa, Streptococcus mutans; identical to SEQ ID NO: 704

SEQ ID NO: 706 - protein, 1345 aa, Streptococcus mutans
MKKPYSIGLDIGTNSVGWAVVTDDYKVPAKKMKVLGNTDKSHIKKNLLGALLFDSGNTAEDRRLKRTARRRYTRRRNRILYLQEIFSEEMDKVDDSFFHRLEDSFLVTEDKRGERHPIFGNLEEEVKYHENFPTIYHLRQYLADNPEKVDLRLVYLALAHIIKFRGHFLIEGKFDTRNNDVQRLFQEFLAVYDNTFENSSLQEQNVQVEEILTDKISKSAKKDRVLKLFPNEKSNGRFAEFLKLIVGNQADFKKHFELEEKAPLQFSKDTYEEELEVLLAQIGDNYAELFLSAKKLYDSILLSGILTVTDVSTKAPLSASMIQRYNEHQMDLAQLKQFIRQKLSDKYNEVFSDVSKDGYAGYIDGKTNQEAFYKYLKGLLNKIEGSGYFLDKIEREDFLRKQRTFDNGSIPHQIHLQEMRAIIRRQAEFYPFLADNQDRIEKILTFRIPYYVGPLARGKSDFAWLSRKSADKITPWNFDEIVDKESSAEAFINRMTNYDLYLPNQKVLPKHSLLYEKFTVYNELTKVKYKTEQGKTAFFDANMKQEIFDGVFKVYRKVTKDKLMDFLEKEFDEFRIVDLTGLDKENKVFNASYGTYHDLCKILDKDFLDNSKNEKILEDIVLTLTLFEDREMIRKRLENYSDLLTKEQVKKLERRHYTGWGRLSAELIHGIRNKESRKTILDYLIDDGNSNRNFMQLINDDALSFKEEIAKAQVIGETDNLNQVVSDIAGSPAIKKGILQSLKIVDELVKIMGHQPENIVVEMARENQFTKQGRRNSQQRLKGLTDSIKEFGSQILKEHPVENSQLQNDRLFLYYLQNGRDMYTGEELDIDYLSQYDIDHIIPQAFIKDNSIDNRVLTSSKENRGKSDDVPSKDVVRKMKSYWSKLLSAKLITQRKFDNLTKAERGGLTDDDKAGFIKRQLVETRQITKHVARILDERFYTETDENNKKIRQVKIVTLKSNLVSNFRKEFELYKVREINDYHHAHDAYLNAVIGKALLGVYPQLEPEFVYGDYPHFHGHKENKATAKKFFYSNIMNFFKKDDVRTDKNGEIIWKKDEHISNIKKVLSYPQVNIVKKVEEQTGGFSKESILPKGNSDKLIPRKTKKFYWDTKKYGGFDSPIVAYSILVIADIEKGKSKKLKTVKALVGVTIMEKMTFERDPVAFLERKGYRNVQEENIIKLPKYSLFKLENGRKRLLASARELQKGNEIVLPNHLGTLLYHAKNIHKVDEPKHLDYVDKHKDEFKELLDVVSNFSKKYTLAEGNLEKIKELYAQNNGEDLKELASSFINLLTFTAIGAPATFKFFDKNIDRKRYTSTTEILNATLIHQSITGLYETRIDLSKLGGD

SEQ ID NO: 707 - protein, 1345 aa, Streptococcus mutans; identical to SEQ ID NO: 706

SEQ ID NO: 708 - protein, 1345 aa, Streptococcus mutans
MKKPYSIGLDIGTNSVGWAVVTDDYKVPAKKMKVLGNTDKSHIKKNLLGALLFDSGNTAEDRRLKRTARRRYTRRRNRILYLQEIFSEEMGKVDDSFFHRLDESFLTDDDKNFDSHPIFGNKAEEDAYHQKFPTIYHLRKHLADSTEKADLRLVYLALAHMIKFRGHFLIEGELNAENTDVQKLFADFVGVYDRTFDDSHLSEITVDASSILTEKISKSRRLEKLINNYPKEKKNTLFGNLIALSLGLQPNFKTNFKLSEDAKLQFSKDTYEEELEVLLAQIGDNYAELFLSAKKLYDSILLSGILTVTDVSTKAPLSASMIQRYNEHQMDLAQLKQFIRQKLSDKYNEVFSDVSKDGYAGYIDGKTNQEAFYKYLKGLLNKIEGSGYFLDKIEREDFLRKQRTFDNGSIPHQIHLQEMRAIIRRQAEFYPFLADNQDRIEKILTFRIPYYVGPLARGKSDFAWLSRKSADKITPWNFDEIVDKESSVEAFINRMTNYDLYLPNQKVLPKHSLLYEKFTVYNELTKVKYKTEQGKTAFFDANMKQEIFDGVFKVYRKVTKDKLMDFLEKEFDEFRIVDLTGLDKENKAFNASYGTYHDLRKILDKDFLDNSKNEKILEDIVLTLTLFEDREMIRKRLKNYSDLLTKEQLKKLERRHYTGWGRLSAELIHGIRNKESRKTILDYLIDDGNSNRNFMQLINDDALSFKEEIAKAQVIGETDNLNQVVSDIAGSPAIKKGILQSLKIVDELVKIMGHQPENIVVEMARENQFTNQGRRNSQQRLKGLTDSIKEFGSQILKEHPVENSQLQNDRLFLYYLQNGRDMYTGEELDIDYLSQYDIDHIIPQAFIKDNSIDNRVLTSSKENRGKSDDVPSKDVVRKMKSYWSKLLSAKLITQRKFDNLTKGERGGLTDDDKAGFIKRQLVETRQITKHVARILDERFNTETDENNKKIRQVKIVTLKSNLVSNFRKEFELYKVREINDYHHAHDAYLNAVIGKALLGVYPQLEPEFVYGDYPHFHGHKENKATAKKFFYSNIMNFFKKDDVRTDKNGEIIWKKDEYISNIKKVLSYPQVNIVKKVEEQTGGFSKESILPKGDSDKLIPRKTKKFYWDTKKYGGFDSPIVAYSILVIADIEKGKSKKLKTVKALVGVTIMEKMTFERDPVAFLERKGYRNVQEENIIKLPKYSLFKLENGRKRLLASARELQKGNEIVLPNHLGTLLYHAKNIHKVDEPKHLDYVDKHKDEFKELLDVVSNFSKKYTLAEGNLEKIKELYAQNNGEDLKELASSFINLLTFTAIGAPATFKFFDKNIDRKRYTSTTEILNATLIHQSITGLYETRIDLSKLGGD

SEQ ID NO: 709 - protein, 1345 aa, Streptococcus mutans
MKKPYSIGLDIGTNSVGWAVVTDDYKVPAKKMKVLGNTDKSHIKKNLLGALLFDSGNTAEDRRLKRTARRRYTRRRNRILYLQEIFSEEMGKVDDSFFHRLDESFLTDDDKNFDSYPIFGNKAEEDAYHQKFPTIYHLRKHLADSTEKADLRLVYLALAHMIKFRGHFLIEGELNAENTDVQKLFADFVGVYDRTFDDSHLSEITVDASSILTEKISKSRRLEKLINNYPKEKKNTLFRNLVALSLGLQPNFKTNFKLSEDAKLQFSKDTYEEDLEELLGKIGDDYADLFTLAKNLYDAILLSGILTADDSSTKAPLSASMIKRYAEHHEDLEKLKEFIKANKPELYHDIFKDETKNGYAGYIENGVKQDEFYKYLKNTLSKIAGSDYFLDKIEREDFLRKQRTFDNGSIPHQIHLQEMHAILRRQGDYYPFLKENQDRIEKILTFRIPYYVGPLARGKSDFAWLSRKSADKITPWNFDEIVDKESSVEAFINRMTNYDLYLPNQKVLPKHSLLYEKFTVYNELTKVKYKTEQGKTAFFDANMKQEIFDGVFKVYRKVTKDKLMDFLEKEFDEFRIVDLTGLDKENKAFNASYGTYHDLRKILDKDFLDNSKNEKILEDIVLTLTLFEDREMIRKRLKNYSDLLTKEQLKKLERRHYTGWGRLSAELIHGIRNKESRKTILDYLIDDGNSNRNFMQLINDDALSFKEEIAKAQVIGETDNLNQVVSDIAGSPAIKKGILQSLKIVDELVKIMGHQPENIVVEMARENQFTNQGRRNSQQRLKGLTDSIKEFGSQILKEHPVENSQLQNDRLFLYYLQNGRDMYTGEELDIDYLSQYDIDHIIPQAFIKDNSIDNRVLTSSKENRGKSDDVPSKDVVRKMKSYWSKLLSAKLITQRKFDNLTKGERGGLTDDDKAGFIKRQLVETRQITKHVARILDERFNTETDENNKKIRQVKIVTLKSNLVSNFRKEFELYKVREINDYHHAHDAYLNAVIGKALLGVYPQLEPEFVYGDYPHFHGHKENKATAKKFFYSNIMNFFKKDDVRTDKNGEIIWKKDEYISNIKKVLSYPQVNIVKKVEEQTGGFSKESILPKGDSDKLIPRKTKKFYWDTKKYGGFDSPIVAYSILVIADIEKGKSKKLKTVKALVGVTIMEKMTFERDPVAFLERKGYRNVQEENIIKLPKYSLFKLENGRKRLLASARELQKGNEIVLPNHLGTLLYHAKNIHKVDEPKHLDYVDKHKDEFKELLDVVSNFSKKYTLAEGNLEKIKELYAQNNGEDLKELASSFINLLTFTAIGAPATFKFFDKNIDRKRYTSTTEILNATLIHQSITGLYETRIDLSKLGGD

SEQ ID NO: 710 - protein, 1345 aa, Streptococcus mutans; identical to SEQ ID NO: 709

SEQ ID NO: 711 - protein, 1345 aa, Streptococcus mutans
MKKPYSIGLDIGTNSVGWAVVTDDYKVPAKKMKVLGNTDKSHIKKNLLGALLFDSGNTAEDRRLKRTARRRYTRRRNRILYLQEIFSEEMGKVDDSFFHRLEDSFLVTEDKRGERHPIFGNLEEEVKYHENFPTIYHLRQYLADNPEKTDLRLVYLALAHIIKFGGHFLIEGKFDTRNNDVQRLFQEFLAVYDNTFENSSLQEQNVQVEEILTDKISKSAKKDRVLKLFPNEKSNGRFAEFLKLIVGNQADFKKHFELEEKAPLQFSKDIYEEELEVLLAQIGDNYAELFLSAKKLYDSILLSGILTVTDVSTKAPLSASMIQRYNEHQMDLAQLKQFIRQKLSDKYNEVFSDVSKDGYAGYIDGKTNQEAFYKYLKGLLNKIEGSGYFLDKIEREDFLRKQRTFDNGSIPHQIHLQEMRAIIRRQAEFYPFLADNQDRIEKILTFRIPYYVGPLARGKSDFAWLSRKSADKITPWNFDEIVDKESSVEAFINRMTNYDLYLPNQKVLPKHSLLYEKFTVYNELTKVKYKTEQGKTAFFDANMKQEIFDGVFKVYRKVTKDKLMDFLEKEFDEFRIVDLTGLDKENKAFNASYGTYHDLRKILDKDFLDNSKNEKILEDIVLTLTLFEDREMIRKRLKNYSDLLTKEQLKKLERRHYTGWGRLSAELIHGIRNKESRKTILDYLIDDGNSNRNFMQLINDDALSFKEEIAKAQVIGETDNLNQVVSDIAGSPAIKKGILQSLKIVDELVKIMGHQPENIVVEMARENQFTNQGRRNSQQRLKGLTDSIKEFGSQILKEHPVENSQLQNDRLFLYYLQNGRDMYTGEELDIDYLSQYDIDHIIPQAFIKDNSIDNRVLTSSKENRGKSDDVPSKNVVRKMKSYWSKLLSAKLITQRKFDNLTKAERGGLTDDDKAGFIKRQLVETRQITKHVARILDERFHTETDENNKKIRQVKIVTLKSNLVSNFRKEFELYKVREINDYHHAHDAYLNAVIGKALLGVYPQLEPEFVYGDYPHFHGHKENKATAKKFFYSNIMNFFKKDDVRTDKNGEIIWKKDEHISNIKKVLSYPQVNIVKKVEEQTGGFSKESILPKGNSDKLIPRKTKKFYWDTKKYGGFDSPIVAYSILVIADIEKGKSKKLKTVKALVGVTIMEKMTFERDPVAFLERKGYRNVQEENIIKLPKYSLFKLENGRKRLLASARELQKGNEIVLPNHLGTLLYHAKNIHKVDEPKHLDYVDKHKDEFKELLDVVSNFSKKYTLAEGNLEKIKELYAQNNGEDLKELASSFINLLTFTAIGAPATFKFFDKNIDRKRYTSTTEILNATLIHQSITGLYETRIDLSKLGGD

SEQ ID NO: 712 - protein, 1345 aa, Streptococcus mutans; identical to SEQ ID NO: 711

SEQ ID NO: 713 - protein, 1345 aa, Streptococcus mutans
MKKPYSIGLDIGTNSVGWAVVTDDYKVPAKKMKVLGNTDKSHIKKNLLGALLFDSGNTAEDRRLKRTARRRYTRRRNRILYLQEIFSEEMGKVDDSFFHRLEDSFLVTEDKRGERHPIFGNLEEEVKYHENFPTIYHLRQYLADNPEKTDLRLVYLALAHIIKFRGHFLIEGKFDTRNNDVQRLFQEFLAVYDNTFENSSLQEQNVQVEEILTDKISKSAKKDRVLKLFPNEKSNGRFAEFLKLIVGNQADFKKHFELEEKAPLQFSKDIYEEELEVLLAQIGDNYAELFLSAKKLYDSILLSGILTVTDVSTKAPLSASMIQRYNEHQMDLAQLKQFIRQKLSDKYNEVFSDVSKDGYAGYIDGKTNQEAFYKYLKGLLNKIEGSGYFLDKIEREDFLRKQRTFDNGSIPHQIHLQEMRAIIRRQAEFYPFLADNQDRIEKILTFRIPYYVGPLARGKSDFAWLSRKSADKITPWNFDEIVDKESSVEAFINRMTNYDLYLPNQKVLPKHSLLYEKFTVYNELTKVKYKTEQGKTAFFDANMKQEIFDGVFKVYRKVTKDKLMDFLEKEFDEFRIVDLTGLDKENKAFNASYGTYHDLRKILDKDFLDNSKNEKILEDIVLTLTLFEDREMIRKRLKNYSDLLTKEQLKKLERRHYTGWGRLSAELIHGIRNKESRKTILDYLIDDGNSNRNFMQLINDDALSFKEEIAKAQVIGETDNLNQVVSDIAGSPAIKKGILQSLKIVDELVKIMGHQPENIVVEMARENQFTNQGRRNSQQRLKGLTDSIKEFGSQILKEHPVENSQLQNDRLFLYYLQNGRDMYTGEELDIDYLSQYDIDHIIPQAFIKDNSIDNRVLTSSKENRGKSDDVPSKNVVRKMKSYWSKLLSAKLITQRKFDNLTKAERGGLTDDDKAGFIKRQLVETRQITKHVARILDERFHTETDENNKKIRQVKIVTLKSNLVSNFRKEFELYKVREINDYHHAHDAYLNAVIGKALLGVYPQLEPEFVYGDYPHFHGHKENKATAKKFFYSNIMNFFKKDDVRTDKNGEIIWKKDEHISNIKKVLSYPQVNIVKKVEEQTGGFSKESILPKGNSDKLIPRKTKKFYWDTKKYGGFDSPIVAYSILVIADIEKGKSKKLKTVKALVGVTIMEKMTFERDPVAFLERKGYRNVQEENIIKLPKYSLFKLENGRKRLLASARELQKGNEIVLPNHLGTLLYHAKNIHKVDEPKHLDYVDKHKDEFKELLDVVSNFSKKYTLAEGNLEKIKELYAQNNGEDLKELASSFINLLTFTAIGAPATFKFFDKNIDRKRYTSTTEILNATLIHQSITGLYETRIDLSKLGGD

SEQ ID NO: 714 - protein, 1345 aa, Streptococcus mutans
MKKPYSIGLDIGTNSVGWAVVTDDYKVPAKKMKVLGNTDKSHIKKNLLGALLFDSGNTAEDRRLKRTARRRYTRRRNRILYLQEIFSEEMGKVDDSFFHRLEDSFLVTEDKRGERHPIFGNLEEEVKYHENFPTIYHLRQYLADNPEKTDLRLVYLALAHIIKFRGHFLIEGKFDTRNNDVQRLFQEFLAVYDNTFENSSLQEQNVQVEEILTDKISKSAKKDRVLKLFPNEKSNGRFAEFLKLIVGNQADFKKHFELEEKAPLQFSKDIYEEELEVLLAQIGDNYAELFLSAKKLYDSILLSGILTVTDVSTKAPLSASMIQRYNEHQMDLAQLKQFIRQKLSDKYNEVFSDVSKDGYAGYIDGKTNQEAFYKYLKGLLNKIEGSGYFLDKIEREDFLRKQRTFDNGSIPHQIHLQEMRAIIRRQAEFYPFLADNQDRIEKILTFRIPYYVGPLARGKSDFAWLSRKSADKITPWNFDEIVDKESSVEAFINRMTNYDLYLPNQKVLPKHSLLYEKFTVYNELTKVKYKTEQGKTAFFDANMKQEIFDGVFKVYRKVTKDKLMDFLEKEFDEFRIVDLTGLDKENKAFNASYGTYHDLRKILDKDFLDNSKNEKILEDIVLTLTLFEDREMIRKRLKNYSDLLTKEQLKKLERRHYTGWGRLSAELIHGIRNKESRKTILDYLIDDGNSNRNFMQLINDDALSFKEEIAKAQVIGETDNLNQVVSDIAGSPAIKKGILQSLKIVDELVKIMGHQPENIVVEMARENQFTNQGRRNSQQRLKGLTDSIKEFGSQILKEHPVENSQLQNDRLFLYYLQNGRDMYTGEELDIDYLSQYDIDHIIPQAFIKDNSIDNRVLTSSKENRGKSDDVPSKDVVRKMKSYWSKLLSAKLITQRKFDNLTKAERGGLTDDDKAGFIKRQLVETRQITKHVARILDERFNTETDENNKKIRQVKIVTLKSNLVSNFRKEFELYKVREINDYHHAHDAYLNAVIGKALLGVYPQLEPEFVYGDYPHFHGHKENKATAKKFFYSNIMNFFKKDDVRTDKNGEIIWKKDEHISNIKKVLSYPQVNIVKKVEEQTGGFSKESILPKGNSYKLIPRKTKKFYWDTKKYGGFDSPIVAYSILVIADIEKGKSKKLKTVKALVGVTIMEKMTFERDPVAFLERKGYRNVQEENIIKLPKYSLFKLENGRKRLLASARELQKGNEIVLPNHLGTLLYHAKNIHKVDEPKHLDYVDKHKDEFKELLDVVSNFSKKYTLAEGNLEKIKELYAQNNGEDLKELASSFINLLTFTAIGAPAAFKFFDKNIDRKRYTSTTEILNATLIHQSITGLYETRIDLSKLGGD

SEQ ID NO: 715 - protein, 1345 aa, Streptococcus mutans
MKKPYSIGLDIGTNSVGWAVVTDDYKVPAKKMKVLGNTDKSHIKKNLLGALLFDSGNTAEDRRLKRTARRRYTRRRNRILYLQEIFSEEMGKVDDSFFHRLEDSFLVTEDKRGERHPIFGNLEEEVKYHENFPTIYHLRQYLADNPEKTDLRLVYLALAHIIKFRGHFLIEGKFDTRNNDVQRLFQEFLAVYDNTFENSSLQEQNVQVEEILTDKISKSAKKDRVLKLFPNEKSNGRFAEFLKLIVGNQADFKKHFELEEKAPLQFSKDIYEEELEVLLAQIGDNYAELFLSAKKLYDSILLSGILTVTDVSTKAPLSASMIQRYNEHQMDLAQLKQFIRQKLSDKYNEVFSDVSKDGYAGYIDGKTNQEAFYKYLKGLLNKIEGSGYFLDKIEREDFLRKQRTFDNGSIPHQIHLQEMRAIIRRQAEFYPFLADNQDRIEKILTFRIPYYVGPLARGKSDFAWLSRKSADKITPWNFDEIVDKESSAEAFINRMTNYDLYLPNQKVLPKHSLLYEKFTVYNELTKVKYKTEQGKTAFFDANMKQEIFDGVFKVYRKVTKDKLMDFLEKEFDEFRIVDLTGLDKENKAFNASYGTYHDLRKILDKDFLDNSKNEKILEDIVLTLTLFEDREMIRKRLKNYSDLLTKEQLKKLERRHYTGWGRLSAELIHGIRNKESRKTILDYLIDDGNSNRNFMQLINDDALSFKEEIAKAQVIGETDNLNQVVSDIAGSLAIKKGILQSLKIVDELVKIMGHQPENIVVEMARENQFTNQGRRNSQQRLKGLTDSIKEFGSQILKEHPVENSQLQNDRLFLYYLQNGRDMYTGEELDIDYLSQYDIDHIIPQAFIKDNSIDNRVLTSSKENRGKSDDVPSKDVVRKMKSYWSKLLSAKLITQRKFDNLTKGERGGLTDDDKAGFIKRQLVETRQITKHVARILDERFNTETDENNKKIRQVKIVTLKSNLVSNFRKEFELYKVREINDYHHAHDAYLNAVIGKALLGVYPQLEPEFVYGDYPHFHGHKENKATAKKFFYSNIMNFFKKDDVRTDKNGEIIWKKDEYISNIKKVLSYPQVNIVKKVEEQTGGFFKESILPKGDSDKLIPRKTKKFYWDTKKYGGFDSPIVAYSILVIADIEKGKSKKLKTVKALVGVTIMEKMTFERDPVAFLERKGYRNVQEENIIKLPKYSLFKLENGRKRLLASARELQKGNEIVLPNHLGTLLYHAKNIHKVDEPKHLDYVDKHKDEFKELLDVVSNFSKKYTLAEGNLEKIKELYAQNNGEDLKELASSFINLLTFTAIGAPATFKFFDKNIDRKRYTSTTEILNATLIHQSITGLYETRIDLSKLGGD

SEQ ID NO: 716 - protein, 1345 aa, Streptococcus mutans
MKKPYSIGLDIGTNSVGWAVVTDDYKVPAKKMKVLGNTDKSHIKKNLLGALLFDSGNTAEDRRLKRTARRRYTRRRNRILYLQEIFSEEMGKVDDSFFHRLEDSFLVTEDKRGERHPIFGNLEEEVKYHENFPTIYHLRQYLADNPEKTDLRLVYLALAHIIKFRGHFLIEGKFDTRNNDVQRLFQEFLAVYDNTFENSSLQEQNVQVEEILTDKISKSAKKDRVLKLFPNEKSNGRFAEFLKLIVGNQADFKKHFELEEKAPLQFSKDIYEEELEVLLAQIGDNYAELFLSAKKLYDSILLSGILTVTDVSTKAPLSASMIQRYNEHQMDLAQLKQFIRQKLSDKYNEVFSDVSKDGYAGYIDGKTNQEAFYKYLKGLLNKIEGSGYFLDKIEREDFLRKQRTFDNGSIPHQIHLQEMRAIIRRQAEFYPFLADNQDRIEKILTFRIPYYVGPLARGKSDFAWLSRKSADKITPWNFDEIVDKESSVEAFINRMTNYDLYLPNQKVLPKHSLLYEKFTVYNELTKVKYKTEQGKTAFFDANMKQEIFDGVFKVYRKVTKDKLMDFLEKEFDEFRIVDLTGLDKENKAFNASYGTYHDLRKILDKDFLDNSKNEKILEDIVLTLTLFEDREMIRKRLKNYSDLLTKEQLKKLERRHYTGWGRLSAELIHGIRNKESRKTILDYLIDDGNSNRNFMQLINDDALSFKEEIAKAQVIGETDNLNQVVSDIAGSPAIKKGILQSLKIVDELVKIMGHQPENIVVEMARENQFTNQGRRNSQQRLKGLTDSIKEFGSQILKEHPVENSQLQNDRLFLYYLQNGRDMYTGEELDIDYLSQYDIDHIIPQAFIKDNSIDNRVLTSSKENRGKSDDVPSKDVVRKMKSYWSKLLSAKLITQRKFDNLTKAERGGLTDDDKAGFIKRQLVETRQITKHVARILDERFNTETDENNKKIRQVKIVTLKSNLVSNFRKEFELYKVREINDYHHAHDAYLNAVIGKALLGVYPQLEPEFVYGDYPHFHGHKENKATAKKFFYSNIMNFFKKDDVRTDKNGEIIWKKDEHISNIKKVLSYPQVNIVKKVEEQTGGFSKESILPKGNSDKLIPRKTKKFYWDTKKYGGFDSPIVAYSILVIADIEKGKSKKLKTVKALVGVTIMEKMTFERDPVAFLERKGYRNVQEENIIKLPKYSLFKLENGRKRLLASARELQKGNEIVLPNHLGTLLYHAKNIHKVDEPKHLDYVDKHKDEFKELLDVVSNFSKKYTLAEGNLEKIKELYAQNNGEDLKELASSFINLLTFTAIGAPATFKFFDKNIDRKRYTSTTEILNATLIHQSITGLYETRIDLNKLGGD

SEQ ID NO: 717 - protein, 1345 aa, Streptococcus mutans; identical to SEQ ID NO: 716

SEQ ID NO: 718 - protein, 1345 aa, Streptococcus mutans; identical to SEQ ID NO: 713

SEQ ID NO: 719 - protein, 1345 aa, Streptococcus mutans; identical to SEQ ID NO: 714

SEQ ID NO: 720 - protein, 1345 aa, Streptococcus mutans; identical to SEQ ID NO: 715

SEQ ID NO: 721 - protein, 1345 aa, Streptococcus mutans
MKKPYSIGLDIGTNSVGWAVVTDDYKVPAKKMKVLGNTDKSHIKKNLLGALLFDSGNTAEDRRLKRTARRRYTRRRNRILYLQEIFSEEMGKVDDSFFHRLEDSFLVTEDKRGERHPIFGNLEEEVKYHENFPTIYHLRQYLADNPEKVDLRLVYLALAHIIKFRGHFLIEGKFDTRNNDVQKLFQEFLAVYDNTFENSSLQEQNVQVEEILTDKISKSAKKDRVLKLFPNEKSNGRFAEFLKLIVGNQADFKKHFELEEKAPLQLSKDTYEEELEVLLAQIGDNYAELFLSAKKLYDSILLSGILTVTDVSTKAPLSASMIQRYNEHQMDLAQLKQFIRQKLSDKYNEVFSDVSKDGYAGYIDGKTNQEAFYKYLKGLLNKIEGSGYFLDKIEREDFLRKQRTFDNGSIPHQIHLQEMRAIIRRQAEFYPFLADNQDRIEKILTFRIPYYVGPLARGKSDFAWLSRKSADKITPWNFDEIVDKESSVEAFINRMTNYDLYLPNQKVLPKHSLLYEKFTVYNELTKVKYKTEQGKTAFFDANMKQEIFDGVFKVYRKVTKDKLMDFLEKEFDEFRIVDLTGLDKENKAFNASYGTYHDLRKILDKDFLDNSKNEKILEDIVLTLTLFEDREMIRKRLENYSDLLTKEQVKKLERRHYTGWGRLSAELIHGIRNKESRKTLLDYLIDDGNSNRNFMQLINDDALSFKEEIAKAQVIGETDNLNQVVSDIAGSPAIKKGILQSLKIVDELVKIMGHQPENIVVEMARENQFTNQGRRNSQQRLKGLTDSIKEFGSQILKEHPVENSQLQNDRLFLYYLQNGRDMYTGEELDIDYLSQYDIDHIIPQAFIKDNSIDNRVLTSSKENRGKSDDVPSKDVVRKMKSYWSKLLSAKLITQRKFDNLTKAERGGLTDDDKAGFIKRQLVETRQITKHVARILDERFNTETDENNKKIRQVKIVTLKSNLVSNFRKEFELYKVREINDYHHAHDAYLNAVIGKALLGVYPQLEPEFVYGDYPHFHGHKENKATAKKFFYSNIMNFFKKDDVRTDKNGEIIWKKDEYISNIKKVLSYPQVNIVKKVEEQTGGFSKESILPKGNSDKLIPRKTKKFYWDTKKYGGFDSPIVAYSILVIADIEKGKSKKLKTVKALVGVTIMEKMTFERDPIAFLERKGYRNVQEENIIKLPKYSLFKLENGRKRLLASARELQKGNEIVLPNHLGTLLYHAKNIHKVDEPKHLDYVDKHKDEFKELLDVVSNFSKKYTLAEGNLEKIKELYAQNNGEDLKELASSFINLLTFTAIGAPATFKFFDKNIDRKRYTSTTEILNATLIHQSITGLYETRIDLSKLGGD

SEQ ID NO: 722 - protein, 1345 aa, Streptococcus mutans; identical to SEQ ID NO: 721

SEQ ID NO: 723 - protein, 1345 aa, Streptococcus mutans
MKKPYSIGLDIGTNSVGWAVVTDDYKVPAKKMKVLGNTDKSHIKKNLLGALLFDSGNTAEDRRLKRTARRRYTRRRNRILYLQEIFSEEMGKVDDSFFHRLEDSFLVTEDKRGERHPIFGNLEEEVKYHENFPTIYHLRQYLADNPEKVDLRLVYLALAHIIKFRGHFLIEGKFDTRNNDVQRLFQEFLAVYDNTFENSSLQEQNVQVEEILTDKISKSAKKDRVLKLFPNEKSNGRFAEFLKLIVGNQADFKKHFELEEKAPLQFSKDTYEEDLEELLGKIGDDYADLFTLAKNLYDAILLSGILTADDSSTKAPLSASMIQRYNEHQMDLAQLKQFIRQKLSDKYNEVFSDVSKDGYAGYIDGKTNQEAFYKYLKGLLNKIEGSGYFLDKIEREDFLRKQRTFDNGSIPHQIHLQEMRAIIRRQAEFYPFLADNQDRIEKILTFRIPYYVGPLARGKSDFAWLSRKSADKITPWNFDEIVDKESSAEAFINRMTNYDLYLPNQKVLPKHSLLYEKFTVYNELTKVKYKTEQGKTAFFDANMKQEIFDGVFKVYRKVTKDKLMDFLEKEFDEFRIVDLTGLDKENKVFNASYGTYHDLCKILDKDFLDNSKNEKILEDIVLTLTLFEDREMIRKRLENYSDLLTKEQVKKLERRHYTGWGRLSAELIHGIRNKESRKTILDYLIDDGNSNRNFMQLINDDALSFKEEIAKAQVIGETDNLNQVVSDIAGSPAIKKGILQSLKIVDELVKIMGHQPENIVVEMARENQFTNQGRRNSQQRLKGLTDSIKEFGSQILKEHPVENSQLQNDRLFLYYLQNGRDMYTGEELDIDYLSQYDIDHIIPQAFIKDNSIDNRVLTSSKENRGKSDDVPSKDVVRKMKSYWSKLLSAKLITQRKFDNLTKAERGGLTDDDKAGFIKRQLVETRQITKHVARILDERFYTETDENNKKIRQVKIVTLKSNLVSNFRKEFELYKVREINDYHHAHDAYLNAVIGKALLGVYPQLEPEFVYGDYPHFHGHKENKATAKKFFYSNIMNFFKKDDVRTDKNGEIIWKKDEHISNIKKVLSYPQVNIVKKVEEQTGGFSKESILPKGNSDKLIPRKTKKFYWDTKKYGGFDSPIVAYSILVIADIEKGKSKKLKTVKALVGVTIMEKMTFERDPVAFLERKGYRNVQEENIIKLPKYSLFKLENGRKRLLASARELQKGNEIVLPNHLGTLLYHAKNIHKVDEPKHLDYVDKHKDEFKELLDVVSNFSKKYTLAEGNLEKIKELYAQNNGEDLKELASSFINLLTFTAIGAPATFKFFDKNIDRKRYTSTTEILNATLIHQSITGLYETRIDLSKLGGD

SEQ ID NO: 724 - protein, 1345 aa, Streptococcus mutans
MKKPYSIGLDIGTNSVGWAVVTDDYKVPAKKMKVLGNTDKSHIKKNLLGALLFDSGNTAEDRRLKRTARRRYTRRRNRILYLQEIFSEEMGKVDDSFFHRLEDSFLVTEDKRGERHPIFGNLEEEVKYHENFPTIYHLRQYLADNPEKVDLRLVYLALAHIIKFRGHFLIEGKFDTRNNDVQRLFQEFLAVYDNTFENSSLQEQNVQVEEILTDKISKSAKKDRVLKLFPNEKSNGRFAEFLKLIVGNQADFKKHFELEEKAPLQFSKDTYEEDLEELLGKIGDDYADLFTLAKNLYDAILLSGILTADDSSTKAPLSASMIQRYNEHQMDLAQLKQFIRQKLSDKYNEVFSDVSKDGYAGYIDGKTNQEAFYKYLKGLLNKIEGSGYFLDKIEREDFLRKQRTFDNGSIPHQIHLQEMRAIIRRQAEFYPFLADNQDRIEKILTFRIPYYVGPLARGKSDFAWLSRKSADKITPWNFDEIVDKESSAEAFINRMTNYDLYLPNQKVLPKHSLLYEKFTVYNELTKVKYKTEQGKTAFFDANMKQEIFDGVFKVYRKVTKDKLMDFLEKEFDEFRIVDLTGLDKENKVFNASYGTYHDLCKILDKDFLDNSKNEKILEDIVLTLTLFEDREMIRKRLENYSDLLTKEQVKKLERRHYTGWGRLSAELIHGIRNKESRKTILDYLIDDGNSNRNFMQLINDDALSFKEEIAKAQVIGETDNLNQVVSDIAGSPAIKKGILQSLKIVDELVKIMGHQPENIVVEMARENQFTNQGRRNSQQRLKGLTDSIKEFGSQILKEHPVENSQLQNDRLFLYYLQNGRDMYTGEELDIDYLSQYDIDHIIPQAFIKDNSIDNRVLTSSKENRGKSDDVPSKDVVRKMKPYWSKLLSAKLITQRKFDNLTKAERGGLTDDDKAGFIKRQLVETRQITKHVARILDERFNTETDENNKKIRQVKIVTLKSNLVSNFRKEFELYKVREINDYHHAHDAYLNAVIGKALLGVYPQLEPEFVYGDYPHFHGHEENKATAKKFFYSNIMNFFKKDDVRTDKNGEIIWKKDEHISNIKKVLSYPQVNIVKKVEEQTGGFSKESILPKGNSDKLIPRKTKKFYWDTKKYGGFDSPIVAYSILVIADIEKGKSKKLKTVKALVGVTIMEKMTFERDPVAFLERKGYRNVQEENIIKLPKYSLFKLENGRKRLLASARELQKGNEIVLPNHLGTLLYHAKNIHKVDEPKHLDYVDKHKDEFKELLDVVSNFSKKYTLAEGNLEKIKELYAQNNGEDLKELASSFINLLTFTAIGAPATFKFFDKNIDRKRYTSTTEILNATLIHQSITGLYETRIDLSKLGGD

SEQ ID NO: 725 - protein, 1345 aa, Streptococcus mutans
MKKPYSIGLDIGTNSVGWAVVTDDYKVPAKKMKVLGNTDKSHIKKNLLGALLFDSGNTAEDRRLKRTARRRYTRRRNRILYLQEIFSEEMGKVDDSFFHRLEDSFLVTEDKRGERHPIFGNLEEEVKYHENFPTIYHLRQYLADNPEKVDLRLVYLALAHIIKFRGHFLIEGKFDTRNNDVQRLFQEFLAVYDNTFENSSLQEQNVQVEEILTDKISKSAKKDRVLKLFPNEKSNGRFAEFLKLIVGNQADFKKHFELEEKAPLQFSKDTYEEELEVLLAQIGDNYAELFLSAKKLYDSILLSGILTVTDVSTKAPLSASMIQRYNEHQMDLAQLKQFIRQKLSDKYNEVFSDVSKDGYAGYIDGKTNQEAFYKYLKGLLNKIEGSGYFLDKIEREDFLRKQRTFDNGSIPHQIHLQEMRAIIRRQAEFYPFLADNQDRIEKILTFRIPYYVGPLARGKSDFAWLSRKSADKITPWNFDEIVDKESSAEAFINRMTNYDLYLPNQKVLPKHSLLYEKFTVYNELTKVKYKTEQGKTAFFDANMKQEIFDGVFKVYRKVTKDKLMDFLEKEFDEFRIVDLTGLDKENKVFNASYGTYHDLCKILDKDFLDNSKNEKILEDIVLTLTLFEDREMIRKRLENYSDLLTKEQVKKLERRHYTGWGRLSAELIHGIRNKESRKTILDYLIDDGNSNRNFMQLINDDALSFKEEIAKAQVIGETDNLNQVVSDIAGSPAIKKGILQSLKIVDELVKIMGHQPENIVVEMARENQFTKQGRRNSQQRLKGLTDSIKEFGSQILKEHPVENSQLQNDRLFLYYLQNGRDMYTGEELDIDYLSQYDIDHIIPQAFIKDNSIDNRVLTSSKENRGKSDDVPSKDVVRKMKSYWSKLLSAKLITQRKFDNLTKAERGGLTDDDKAGFIKRQLVETRQITKHVARILDERFYTETDENNKKIRQVKIVTLKSNLVSNFRKEFELYKVREINDYHHAHDAYLNAVIGKALLGVYPQLEPEFVYGDYPHFHGHKENKATAKKFFYSNIMNFFKKDDVRTDKNGEIIWKKDEHISNIKKVLSYPQVNIVKKVEEQTGGFSKESILPKGNSDKLIPRKTKKFYWDTKKYGGFDSPIVAYSILVIADIEKGKSKKLKTVKALVGVTIMEKMTFERDPVAFLERKGYRNVQEENIIKLPKYSLFKLENGRKRLLASARELQKGNEIVLPNHLGTLLYHAKNIHKVDEPKHLDYVDKHKDEFKELLDVVSNFSKKYTLAEGNLEKIKELYAQNNGEDLKELASSFINLLTFTAIGAPATFKFFDKNIDRKRYTSTTEILNATLIHQSITGLYETRIDLSKLGGD

SEQ ID NO: 726 - protein, 1345 aa, Streptococcus mutans
MKKPYSIGLDIGTNSVGWAVVTDDYKVPAKKMKVLGNTDKSHIKKNLLGALLFDSGNTAEDRRLKRTARRRYTRRRNRILYLQEIFSEEMGKVDDSFFHRLEDSFLVTEDKRGERHPIFGNLEEEVKYHENFPTIYHLRQYLADNPEKVDLRLVYLALAHIIKFRGHFLIEGKFDTRNNDVQRLFQEFLAVYDNTFENSSLQEQNVQVEEILTDKISKSAKKDRVLKLFPNEKSNGRFAEFLKLIVGNQADFKKHFELEEKAPLQFSKDTYEEELEVLLAQIGDNYAELFLSAKKLYDSILLSGILTVTDVSTKAPLSASMIQRYNEHQMDLAQLKQFIRQKLSDKYNEVFSDVSKDGYAGYIDGKTNQEAFYKYLKGLLNKIEGSGYFLDKIEREDFLRKQRTFDNGSIPHQIHLQEMRAIIRRQAEFYPFLADNQDRIEKILTFRIPYYVGPLARGKSDFAWLSRKSADKITPWNFDEIVDKESSAEAFINRMTNYDLYLPNQKVLPKHSLLYEKFTVYNELTKVKYKTEQGKTAFFDANMKQEIFDGVFKVYRKVTKDKLMDFLEKEFDEFRIVDLTGLDKENKVFNASYGTYHDLCKILDKDFLDNSKNEKILEDIVLTLTLFEDREMIRKRLENYSDLLTKEQVKKLERRHYTGWGRLSAELIHGIRNKESRKTILDYLIDDGNSNRNFMQLINDDALSFKEEIAKAQVIGETDNLNQVVSDIAGSPAIKKGILQSLKIVDELVKIMGHQPENIVVEMARENQFTKQGRRNSQQRLKGLTDSIKEFGSQILKEHPVENSQLQNDRLFLYYLQNGRDMYTGEELDIDYLSQYDIDHIIPQAFIKDNSIDNRVLTSSKENRGKSDDVPSKDVVRKMKSYWSKLLSAKLITQRKFDNLTKAERGGLTDDDKAGFIKRQLVETRQITKHVARILDERFYTETDENNKKIRQVKIVTLKSNLVSNFRKEFELYKVREINDYHHAHDAYLNAVIGKALLGVYPQLEPEFVYGDYPHFHGHKENKATAKKFFYSNIMNFFKKDDVRTDRNGEIIWKKDEHISNIKKVLSYPQVNIVKKVEEQTGGFSKESILPKGNSDKLIPRKTKKFYWDTKKYGGFDSPIVAYSILVIADIEKGKSKKLKTVKALVGVTIMEKMTFERDPVAFLERKGYRNVQEENIIKLPKYSLFKLENGRKRLLASARELQKGNEIVLPNHLGTLLYHAKNIHKVDEPKHLDYVDKHKDEFKELLDVVSNFSKKYTLAEGNLEKIKELYAQNNGEDLKELASSFINLLTFTAIGAPATFKFFDKNIDRKRYTSTTEILNATLIHQSITGLYETRIDLSKLGGD

SEQ ID NO: 727 - protein, 1345 aa, Streptococcus mutans
MKKPYSIGLDIGTNSVGWAVVTDDYKVPAKKMKVLGNTDKSHIKKNLLGALLFDSGNTAEDRRLKRTARRRYTRRRNRILYLQEIFSEEMGKVDDSFFHRLEDSFLVTEDKRGERHPIFGNLEEEVKYHENFPTIYHLRQYLADNPEKVDLRLVYLALAHIIKFRGHFLIEGKFDTRNNDVQRLFQEFLAVYDNTFENSSLQEQNVQVEEILTDKISKSAKKDRVLKLFPNEKSNGRFAEFLKLIVGNQADFKKHFELEEKAPLQFSKDTYEEELEVLLAQIGDNYAELFLSAKKLYDSILLSGILTVTDVSTKAPLSASMIQRYNEHQMDLAQLKQFIRQKLSDKYNEVFSDVSKDGYAGYIDGKTNQEAFYKYLKGLLNKIEGSGYFLDKIEREDFLRKQRTFDNGSIPHQIHLQEMRAIIRRQAEFYPFLADNQDRIEKILTFRIPYYVGPLARGKSDFAWLSRKSADKITPWNFDEIVDKESSAEAFINRMTNYDLYLPNQKVLPKHSLLYEKFTVYNELTKVKYKTEQGKTAFFDANMKQEIFDGVFKVYRKVTKDKLMDFLEKEFDEFRIVDLTGLDKENKVFNASYGTYHDLCKILDKDFLDNSKNEKILEDIVLTLTLFEDREMIRKRLENYSDLLTKEQVKKLERRHYTGWGRLSAELIHGIRNKESRKTILDYLIDDGNSNRNFMQLINDDALSFKEEIAKAQVIGETDNLNQVVSDIAGSPAIKKGILQSLKIVDELVKIMGHQPENIVVEMARENQFTNQGRQNSQQRLKGLTDSIKEFGSQILKEHPVENSQLQNDRLFLYYLQNGRDMYTGEELDIDYLSQYDIDHIIPQAFIKDNSIDNRVLTSSKENRGKSDDVPSEDVVRKMKSYWSKLLSAKLITQRKFDNLTKAERGGLTDDDKAGFIKRQLVETRQITKHVARILDERFYTETDENNKKIRQVKIVTLKSNLVSNFRKEFELYKVREINDYHHAHDAYLNAVIGKALLGVYPQLEPEFVYGDYPHFHGHKENKATAKKFFYSNIMNFFKKDDVRTDKNGEIIWKKDEHISNIKKVLSYPQVNIVKKVEEQTGGFSKESILPKGNSDKLIPRKTKKFYWDTKKYGGFDSPIVAYSILVIADIEKGKSKKLKTVKALVGVTIMEKMTFERDPVAFLERKGYRNVQEENIIKLPKYSLFKLENGRKRLLASARELQKGNEIVLPNHLGTLLYHAKNIHKVDEPKHLDYVDKHKDEFKELLDVVSNFSKKYTLAEGNLEKIKELYAQNNGEDLKELASSFINLLTFTAIGAPATFKFFDKNIDRKRYTSTTEILNATLIHQSITGLYETRIDLSKLGGD

SEQ ID NO: 728 - protein, 1345 aa, Streptococcus mutans; identical to SEQ ID NO: 727

SEQ ID NO: 729 - protein, 1345 aa, Streptococcus mutans; identical to SEQ ID NO: 723

SEQ ID NO: 730 - protein, 1345 aa, Streptococcus mutans; identical to SEQ ID NO: 724

SEQ ID NO: 731 - protein, 1345 aa, Streptococcus mutans; identical to SEQ ID NO: 725

SEQ ID NO: 732 - protein, 1345 aa, Streptococcus mutans; identical to SEQ ID NO: 726

SEQ ID NO: 733 - protein, 1345 aa, Streptococcus mutans; identical to SEQ ID NO: 725

SEQ ID NO: 734 - protein, 1345 aa, Streptococcus mutans; identical to SEQ ID NO: 725

SEQ ID NO: 735 - protein, 1345 aa, Streptococcus mutans; identical to SEQ ID NO: 725

SEQ ID NO: 736 - protein, 1345 aa, Streptococcus mutans; identical to SEQ ID NO: 726

SEQ ID NO: 737 - protein, 1345 aa, Streptococcus mutans
MKKPYSIGLDIGTNSVGWAVVTDDYKVPAKKMKVLGNTDKSHIKKNLLGALLFDSGNTAEDRRLKRTARRRYTRRRNRILYLQEIFSEEMGKVNDSFFHRLEDSFLVTEDKRGERHPIFGNLEEEVKYHENFPTIYHLRQYLADNPEKVDLRLVYLALAHIIKFRGHFLIEGKFDTRNNDVQRLFQEFLAVYDNTFENSSLQEQNVQVEEILTDKISKSAKKDRVLKLFPNEKSNGRFAEFLKLIVGNQADFKKHFELEEKAPLQFSKDTYEEELEVLLAQIGDNYAELFLSAKKLYDSILLSGILTVTDVSTKAPLSASMIQRYNEHQMDLAQLKQFIRQKLSDKYNEVFSDVSKDGYAGYIDGKTNQEAFYKYLKGLLNKIEGSGYFLDKIEREDFLRKQRTFDNGSIPHQIHLQEMRAIIRRQAEFYPFLADNQDRIEKILTFRIPYYVGPLARGKSDFAWLSRKSADKITPWNFDEIVDKESSAEAFINRMTNYDLYLPNQKVLPKHSLLYEKFTVYNELTKVKYKTEQGKTAFFDANMKQEIFDGVFKVYRKVTKDKLMDFLEKEFDEFRIVDLTGLDKENKVFNASYGTYHDLCKILDKDFLDNSKNEKILEDIVLTLTLFEDREMIRKRLENYSDLLTKEQVKKLERRHYTGWGRLSAELIHGIRNKESRKTILDYLIDDGNSNRNFMQLINDDALSFKEEIAKAQVIGETDNLNQVVSDIAGSPAIKKGILQSLKIVDELVKIMGHQPENIVVEMARENQFTKQGRRNSQQRLKGLTDSIKEFGSQILKEHPVENSQLQNDRLFLYYLQNGRDMYTGEELDIDYLSQYDIDHIIPQAFIKDNSIDNRVLTSSKENRGKSDDVPSKDVVRKMKSYWSKLLSAKLITQRKFDNLTKAERGGLTDDDKAGFIKRQLVETRQITKHVARILDERFYTETDENNKKIRQVKIVTLKSNLVSNFRKEFELYKVREINDYHHAHDAYLNAVIGKALLGVYPQLEPEFVYGDYPHFHGHKENKATAKKFFYSNIMNFFKKDDVRTDKNGEIIWKKDEYISNIKKVLSYPQVNIVKKVEEQTGGFSKESILPKGNSDKLIPRKTKKFYWDTKKYGGFDSPIVAYSILVIADIEKGKSKKLKTVKALVGVTIMEKMTFERDPIAFLERKGYRNVQEENIIKLPKYSLFKLENGRKRLLASARELQKGNEIVLPNHLGTLLYHAKNIHKVDEPKHLDYVDKHKDEFKELLDVVSNFSKKYTLAEGNLEKIKELYAQNNGEDLKELASSFINLLTFTAIGAPAAFKFFDKNIDRKRYTSTTEILNATLIHQSITGLYETRIDLSKLGGD

SEQ ID NO: 738 - protein, 1345 aa, Streptococcus mutans; identical to SEQ ID NO: 737

SEQ ID NO: 739 - protein, 1345 aa, Streptococcus mutans
MKKPYSIGLDIGTNSVGWAVVTDDYKVPAKKMKVLGNTDKSHIKKNLLGALLFDSGNTAEDRRLKRTTRRRYTRRRNRILYLQEIFSEEMGKVDDSFFHRLEDSFLVTEDKRGERHPIFGNLEEEVKYHENFPTIYHLRQYLADNPEKTDLRLVYLALAHIIKFRGHFLIEGKFDTRNNDVQRLFQEFLAVYDNTFENSSLQEQNVQVEEILTDKISKSAKKDRVLKLFPNEKSNGCFAEFLKLIVGNQADFKKHFELEEKAPLQFSKDTYEEELEVLLAQIGDNYAELFLSAKKLYDSILLSGILTVTDVSTKAPLSASMIQRYNEHQMDLTQLKQFIRQKLSDKYNEVFSDVSKDGYAGYIDGKTNQEAFYKYLKGLLNKIEGSGYFLDKIEREDFLRKQRTFDNGSIPHQIHLQEMRAIIRRQAEFYPFLADNQDRIEKLLTFRIPYYVGPLASGKSDFAWLSRKSADKITPWNFDEIVDKESSAEAFINRMTNYDLYLPNQKVLPKHSLLYEKFTVYNELTKVKYKTEQGKTAFFDANMKQEIFDGVFKVYRKVTKDKLMDFLEKEFDEFRIVDLTGLDKENKVFNASYGTYHDLCKILDKDFLDNSKNEKILEDIVLTLTLFEDREMIRKRLENYSDLLTKEQVKKLERRHYTGWGRLSAELIHGIRNKESRKTILDYLIDDGNSNRNFMQLINDDALSFKEEIAKAQVIGETDNLNQVVSDIAGSPAIKKGILQSLKIVDELVKIMGHQPENIVVEMARENQFTNQGRRNSQQRLKGLTDSIKEFGSQILKEHPVENSQLQNDRLFLYYLQNGRDMYTGEELDIDYLSQYDIDHIIPQAFIKDNSIDNRVLTSSKENRGKSDDVPSKDVVRKMKSYWSKLLSAKLITQRKFDNLTKAERGGLTDDDKAGFIKRQLVETRQITKHVARILDERFNTETDENNKKIRQVKIVTLKSNLVSNFRKEFELYKVREINDYHHAHDAYLNAVIGKALLGVYPQLEPEFVYGDYPHFHGHKENKATAKKFFYSNIMNFFKKDDVRTDKNGEIIWKKDEHISNIKKVLSYPQVNIVKKVEEQTGGFSKESILPKGNSDKLIPRKTKKFYWDTKKYGGFDSPIVAYSILVIADIEKGKSKKLKTVKALVGVTIMEKMTFERDPVAFLERKGYRNVQEENIIKLPKYSLFKLENGRKRLLASARELQKGNEIVLPNHLGTLLYHAKNIHKVDEPKHLDYVDKHKDEFKELLDVVSNFSKKYTLAEGNLEKIKELYAQNNGEDLKELASSFINLLTFTAIGAPATFKFFDKNIDRKRYTSTTEILNATLIHQSITGLYETRIDLSKLGGD

SEQ ID NO: 740 - protein, 1345 aa, Streptococcus mutans; identical to SEQ ID NO: 739

SEQ ID NO: 741 - protein, 1350 aa, Streptococcus mutans
MKKPYSIGLDIGTNSVGWAVVTDDYKVPAKKMTVLGNTDKSHIKKNLLGALLFDSGNTAADRRLKRTARRRYTRRRNRILYLQEIFAEEMSKVDDSFFHRLEDSFLVTEDKRGERHPIFGNLEEEVKYHENFPTIYHLRQYLADNPEKVDLRLVYLALAHIIKFRGHFLIEGKFDTRNNDVQRLFQEFLAVYDNTFENSSLQEQNVQVEEILTDKISKSAKKDRVLKLFPNEKSNGRFAEFLKLIVGNQADFKKHFELEEKTPLQFSKDTYEEELEVLLAQIGDNYAELFLSAKKLYDSILLSGILTVTDVSTKAPLSASMIQRYNEHQMDLAQLKQFIRQKLSDKYNEVFSDVSKDGYAGYIDGKTNQEAFYKYLKGLLNKIEGSGYFLDKIEREDFLRKQRTFDNGSIPHQIHLQEMRAIIRRQAEFYPFLADNQDRIEKILTFRIPYYVGPLARGKSDFAWLSRKSADKITPWNFDEIVDKESSAEAFINRMTNYDLYLPNQKVLPKHSLLYEKFTVYNELTKVKYKTEQGKTAFFDANMKQEIFDGVFKVYRKVTKDKLMDFLEKEFDEFRIVDLTGLDKENKAFNASYGTYHDLRKILDKDFLDNSKNEKILEDIVLTLTLFEDREMIRKRLENYSDLLTKEQVKKLERRHYTGWGRLSAELIHGIRNKESRKTILDYLIDDGNSNRNFMQLINDDALSFKEEIAKAQVIGETDNLNQVVSDIAGSPAIKKGILQSLKIVDELVKIMGHQPENIVVEMARENQFTNQGRRNSQQRLKGLTDSIKEFGSQILKEHPVENSQLQNDRLFLYYLQNGRDMYTGEELDIDYLSQYDIDHIIPQAFIKDNSIDNRVLTSSKENRGKSDDVPSEDVVNRMRPFWNKLLSSGLISQRKYNNLTKKELTPDDKAGFIKRQLVETRQITKHVARMLDERFNKEFDDNNKRIRRVKIVTLKSNLVSSFRKEFELYKVREINDYHHAHDAYLNAVVVKALLVKYPKLEPEFVYGEYPKYNSYRERKTATQKMFFYSNIMNMFKSKVKLADDQIVERPMIEVNDETGEIAWDKTKHITTVKKVLSYPQVNIVKKVEEQTIGQNGGLFDDNPKSPLEVIPSKLVPLKKALNPEKYGGYQKPTTAYPILLIVDTKQLIPISVMDKKRFEQNPVKFLKDKGYQQIEKNNFVKLPKYTLVDIGNGIKRLWASSKEVHKGNQLVVSKKSQDLLYHAHHLDNDYSNEYVKNHYQQFDILFNEITSFSKKCKLGKEHIQKIEEAYSKERDSASIEELADGFIKLLGFTQLGATSPFSFLGIKLNQKQYTGKKDYLLPCMEATLIHQSITGLYETRIDLSKLGGD

SEQ ID NO: 742 - protein, 1350 aa, Streptococcus mutans; identical to SEQ ID NO: 741

SEQ ID NO: 743 - protein, 1345 aa, Streptococcus mutans
MKKPYSIGLDIGTNSVGWAVVTDDYKVPDKKMKVLGNTDKSHIKKNLLGALLFDSGNTAEDRRLKRTARRRYTRRRNRILYLQEIFSEEMGKVDDSFFHRLEDSFLVTEDKRGERHPIFGNLEEEVKYHENFPTIYHLRQYLADNPEKTDLRLVYLALAHIIKFRGHFLIEGKFDTRNNDVQRLFQEFLAVYDNTFENSSLQEQNVQVEEILTDKISKSAKKDRVLKLFPNEKSNGRFAEFLKLIVGNQADFKKHFELEEKAPLQFSKDIYEEELEVLLAQIGDNYAELFLSAKKLYDSILLSGILTVTDVSTKAPLSASMIQRYNEHQMDLAQLKQFIRQKLSDKYNEVFSDVSKDGYAGYIDGKTNQEAFYKYLKGLLNKIEGSGYFLDKIEREDFLRKQRTFDNGSIPHQIHLQEMRAIIRRQAEFYPFLADNQDRIEKILTFRIPYYVGPLARGKSDFAWLSRKSADKITPWNFDEIVDKESSVEAFINRMTNYDLYLPNQKVLPKHSLLYEKFTVYNELTKVKYKTEQGKTAFFDANMKQEIFDGVFKVYRKVTKDKLMDFLEKEFDEFRIVDLTGLDKENKAFNASYGTYHDLRKILDKDFLDNSKNEKILEDIVLTLTLFEDREMIRKRLKNYSDLLTKEQLKKLERRHYTGWGRLSAELIHGIRNKESRKTILDYLIDDGNSNRNFMQLINDDALSFKEEIAKAQVIGETDNLNQVVSDIAGSPAIKKGILQSLKIVDELVKIMGHQPENIVVEMARENQFTNQGRRNSQQRLKGLTDSIKEFGSQILKEHPVENSQLQNDRLFLYYLQNGRDMYTGEELDIDYLSQYDIDHIIPQAFIKDNSIDNRVLTSSKENRGKSDDVPSKDVVRKMKSYWSKLLSAKLITQRKFDNLTKAERGGLTDDDKAGFIKRQLVETRQITKHVARILDERFYTETDENNKKIRQVKIVTLKSNLVSNFRKEFELYKVREINDYHHAHDAYLNAVIGKALLGVYPQLEPEFVYGDYPHFHGHKENKATAKKFFYSNIMNFFKKDDVRTDKNGEIIWKKDEHISNIKKVLSYPQVNIVKKVEEQTGGFSKESILPKGNSDKLIPRKTKKFYWDTKKYGGFDSPIVAYSILVIADIEKGKSKKLKTVKALVGVTIMEKMTFERDPVAFLERKGYRNVQEENIIKLPKYSLFKLENGRKRLLASARELQKGNEIVLPNHLGTLLYHAKNIHKVDEPKHLDYVDKHKDEFKELLDVVSNFSKKYTLAEGNLEKIKELYAQNNGEDLKELASSFINLLTFTAIGAPATFKFFDKNIDRKRYTSTTEILNATLIHQSITGLYETRIDLSKLGGD

SEQ ID NO: 744 - protein, 1345 aa, Streptococcus mutans
MKKPYSIGLDIGTNSVGWAVVTDDYKVSAKKMKVLGNTDKSHIKKNLLGALLFDSGNTAEDRRLKRTARRRYTRRRNRILYLQEIFAEEMSKVDDSFFHRLEDSFLVTEDKRGERHPIFGNLEEEVKYHENFPTIYHLRQYLADNPEKVDLRLVYLALAHIIKFRGHFLIEGKFDTRNNDVQRLFQEFLAVYDNTFENSSLQEQNVQVEEILTDKISKSAKKDRVLKLFPNEKSNGRFAEFLKLIVGNQADFKKHFELEEKAPLQFSKDTYEEELEVLLAQIGDNYAELFLSAKKLYDSILLSGILTVTDVSTKAPLSASMIQRYNEHQMDLAQLKQFIRQKLSDKYNEVFSDVSKDGYAGYIDGKTNQEAFYKYLKGLLNKIEGSGYFLDKIEREDFLRKQRTFDNGSIPHQIHLQEMRAIIRRQAEFYPFLADNQDRIEKILTFRIPYYVGPLARGKSDFAWLSRKSADKITPWNFDEIVDKESSAEAFINRMTNYDLYLPNQKVLPKHSLLYEKFTVYNELTKVKYKTEQGKTAFFDANMKQEIFDGVFKVYRKVTKDKLMDFLEKEFDEFRIVDLTGLDKENKAFNASYGTYHDLRKILDKDFLDNSKNEKILEDIVLTLTLFEDREMIRKRLENYSDLLTKEQVKKLERRHYTGWGRLSAELIHGIRNKESRKTILDYLIDDGNSNRNFMQLINDDALSFKEEIAKAQVIGETDNLNQVVSDIAGSPAIKKGILQSLKIVDELVKIMGHQPENIVVEMARENQFTNQGRRNSQQRLKGLTDSIKEFGSQILKEHPVEHSQLQNDRLFLYYLQNGRDMYTGEELDIDYLSQYDIDHIIPQAFIKDNSIDNRVLTSSKENRGKSDDVPSKNVVRKMKSYWSKLLSAKLITQRKFDNLTKAERGGLTDDDKAGFIKRQLVETRQITKHVARILDERFHTETDENNKKIRQVKIVTLKSNLVSNFRKEFELYKVREINDYHHTHDAYLNAVIGKALLGVYPQLEPEFVYGDYPHFHGHKENKATAKKFFYSNIMNFFKKDDVRTDKNGEIIWKKDEHISNIKKVLSYPQVNIVKKVEEQTGGFSKESILPKGNSDKLIPRKTKKFYWDTKKYGGFDSPIVAYSILVIADIEKGKSKKLKTVKALVGVTIMEKMTFERDPVAFLERKGYRNVQEENIIKLPKYSLFKLENGRKRLLASARELQKGNEIVLPNHLGTLLYHAKNIHKVDEPKHLDYVDKHKDEFKELLDVVSNFSKKYTLAEGNLEKIKELYAQNNGEDLKELASSFINLLTFTAIGAPATFKFFDKNIDRKRYTSTTEILNATLIHQSITGLYETRIDLSKLGGD

SEQ ID NO: 745 - protein, 1345 aa, Streptococcus mutans; identical to SEQ ID NO: 744

SEQ ID NO: 746 - protein, 1345 aa, Streptococcus mutans
MKKPYSIGLDIGTNSVGWSVVTDDYKVPAKKMKVLGNTDKSHIEKNLLGALLFDSGNTAEDRRLKRTARRRYTRRRNRILYLQEIFSEEMGKVDDSFFHRLEDSFLVTEDKRGERHPIFGNLEEEVKYHENFPTIYHLRQYLADNPEKVDLRLVYLALAHIIKFRGHFLIEGKFDTRNNDVQRLFQEFLAVYDNTFENSSLQEQNVQVEEILTDKISKSAKKDRVLKLFPNEKSNGRFAEFLKLIVGNQADFKKHFELEEKAPLQFSKDTYEEELEVLLAQIGDNYAELFLSAKKLYDSILLSGILTVTDVGTKAPLSASMIQRYNEHQMDLAQLKQFIRQKLSDKYNEVFSDVSKDGYAGYIDGKTNQEAFYKYLKGLLNKIEGSGYFLDKIEREDFLRKQRTFDNGSIPHQIHLQEMRAIIRRQAEFYPFLADNQDRIEKLLTFRIPYYVGPLARGKSDFAWLSRKSADKITPWNFDEIVDKESSAEAFINRMTNYDLYLPNQKVLPKHSLLYEKFTVYNELTKVKYKTEQGKTAFFDANMKQEIFDGVFKVYRKVTKDKLMDFLEKEFDEFRIVDLTGLDKENKVFNASYGTYHDLCKILDKDFLDNSKNEKILEDIVLTLTLFEDREMIRKRLENYSDLLTKEQVKKLERRHYTGWGRLSAELIHGIRNKESRKTILDYLIDDGNSNRNFMQLINDDALSFKEEIAKAQVIGETDNLNQVVSDIAGSPAIKKGILQSLKIVDELVKIMGHQPENIVVEMARENQFTNQGRRNSQQRLKGLTDSIKEFGSQILKEHPVENSQLQNDRLFLYYLQNGRDMYTGEELDIDYLSQYDIDHIIPQAFIKDNSIDNRVLTSSKENRGKSDDVPSKDVVRKMKSYWSKLLSAKLITQRKFDNLTKAERGGLTDDDKAGFIKRQLVETRQITKHVARILDERFNTETDENNKKIRQVKIVTLKSNLVSNFRKEFELYKVREINDYHHAHDAYLNAVIGKALLGVYPQLEPEFVYGDYPHFHGHKENKATAKKFFYSNIMNFFKKDDVRIDKNGEIIWKKDEHISNIKKVLSYPQVNIVKKVEEQTGGFSKESILPKGNSDKLIPRKTKKFYWDTKKYGGFDSPIVAYSILVIADIEKGKSKKLKTVKALVGVTIMEKMTFERDPVAFLERKGYRNVQEENIIKLPKYSLFKLENGRKRLLASARELQKGNEIVLPNHLGTLLYHAKNIHKVDEPKHLDYVDKHKDEFKELLDVVSNFSKKYTLAEGNLEKIKELYAQNNGEDLKELASSFINLLTFTAIGAPATFKFFDKNIDRKRYTSTTEILNATLIHQSITGLYETRIDLSKLGGD

SEQ ID NO: 747 - protein, 1345 aa, Streptococcus mutans; identical to SEQ ID NO: 746

SEQ ID NO: 748 - protein, 1355 aa, Streptococcus mutans
MKKSYSIGLDIGTNSVGWAVVTDDYKVPAKKMKVLGNTDKSHIKKNLLGALLFDSGNTAEDRRLKRTARRRYTRRRNRILYLQEIFSEEMGKVDDSFFHRLDESFLTDDDKNFDSHPIFGNKAEEDAYHQKFPTIYHLRKHLADSTEKADLRLVYLALAHMIKFRGHFLIEGELNAENTDVQKLFADFVGVYDRTFDDSHLSEITVDASSILTEKISKSRRLEKLINNYPKEKKNTLFGNLIALSLGLQPNFKTNFKLSEDAKLQFSKDTYEEDLEELLGKIGDDYADLFTLAKNLYDAILLSGILTADDSSTKAPLSASMIKRYAEHHEDLEKLKEFIKANKPELYHDIFKDETKNGYAGYIENGVKQDEFYKYLKNTLSKIAGSDYFLDKIEREDFLRKQRTFDNGSIPHQIHLQEMHAILRRQGDYYPFLKENQDRIEKILTFRIPYYVGPLARKNSRFAWAEYHSDEAVMPWNFDQVIDKESSAQAFIEHMTNNDLYLPNEKVLPKHSPLYEKYTVYNELTKIKYVTEIGEAKFFDANLKQEIFDGLFKHERKVTKKKLRTFLDKNFDEFRIVDIQGLDKETETFNASYATYQDLLKVIKDKVFMDNPENAEILENIVLTLTLFEDREMIKQRLAKYADVFDKKVIDQLARRHYTGWGRLSAKLLNGIRDKQSCKTIMDYLIDDAQSNRNLMQLITDDNLTFKDDIVKAQYVDNSDDLHQVVQSLAGSPAIKKGILQSLKIVDELVKVMGKEPEQIVVEMARENQTTAKGRRNSQQRYKRLKEAIKSLDRDLNHKILKEHPTDNQALQNNRLFLYYLQNGRDMYTGESLDINRLSDYDIDHVIPQAFIKDNSIDNRVLTSSKANRGKSDDVPSEDVVNRMRPFWNKLLSSGLISQRKYNNLTKKELTPDDKAGFIKRQLVETRQITKHVARMLDERFNKEFDDNNKRIRRVKIVTLKSNLVSSFRKEFELYKVREINDYHHAHDAYLNAVVVKALLVKYPKLEPEFVYGEYPKYNSYRERKTATQKMFFYSNIMNMFKSKVKLADDQIVERPMIEVNDETGEIAWDKTKHITTVKKVLSYPQVNIVKKVEEQTIGQNGGLFDDNPKSPLEVIPSKLVPLKKALNPEKYGGYQKPTTAYPILLIVDTKQLIPISVMDKKRFEQNPVKFLKDKGYQQIEKNNFVKLPKYTLVDIGNGIKRLWASSKEVHKGNQLVVSKKSQDLLYHAHHLDNDYSNEYVKNHYQQFDILFNEITSFSKKCKLGKEHIQKIEEAYSKERDSASIEELADGFIKLLGFTQLGATSPFSFLGIKLNQKQYTGKKDYLLPCMEATLIHQSITGLYETRIDLNKLGGD

SEQ ID NO: 749 - protein, 1355 aa, Streptococcus mutans; identical to SEQ ID NO: 748

SEQ ID NO: 750 - protein, 1125 aa, Streptococcus mutans
MTNGKILGLDIGIASVGVGIINAKTGNVEHASSRIFPAANADNNVERRSARGGRRLIRRKKHRLKRVEDLFEKYNIDTDFSNLNLNPYQLRVKGLNEQLSNEELFAILKNIAKRRGISYLDDAEDDSVGSSDYAKAIDENRKLLKKQTPGEIQLKRLEKYGQLRGNFTIQDENGEYHRLINVFSTSDYVKEARRILETQSYYNKFITESFVEDYIKILQGKRKYYVGPGNEKSRTDYGIYRTDGETLDNLFGILIGKCGFYPEEYRAAKASYTAQEYNFLNDLNNLTVPTETKKLSTEQKYQLVDFAKTASTLEAAKLLKEIAKLVGCQVEEIKGYRLDNKDKPDLHTFEPFRKLKSNLTTIAVENLSITTLDTLAHILTLNTEREGIEEAIQKELPNIFSDEQITGIIAVRKKNSQIFGKGWHSFSIKLMKELIPELYETSEEQMTILIRLKKVKTNSKITNRTKYINEQEVTDEIYNPVVSKSIRQTVKIINAAIKKYGAFDQIVIEMPRESNEEDERKFIADLQKSNAKEKDDAMKQAALLYNGKAELPHGVFHGHKELATKIRLWYQQGERCLYSGKHIDIHDLIHNQHMFEIDHVLPLSLSFDDSLANKVLVYSWANQEKGQRTPFQALPQMASAWSFRELRDYISKQKGISKKKRDYLLTEQDINKVEVKQKFIERNLVDTRYVSRVVLNTLQDALKVMNKETKISVIRGQFTSQLRRQWRIDKSRETYHHHAVDALIIAASSQLRLWKKQNNPMFAEDKHGQKINLDTGEVLSDDAYKELVYQAPYQGFVNTISSKSFEDEILFSYQVDSKVNRKISDATIYATRQAQLGKDKKEETYVLGKIKDIYSQAGYDAFRKKYDKDKAVFLMYQKDPETWEKVIEVILRDYKELDDKGKEIGNPFERYKVKHGFVRKYSRKNKGTEIKSLKYYDNKLGNHIDITPNNSKHSVVLQSINPWRADLYFNPETTKYELMGLKYADLSFEKGTGKYSISREKYDEIKEREGISSKSEFKFTLYKNDLILVKDIGNHKELIARFNSKNDTSKHYVELKPWNKAKFDSEEELIPAFGKVAKSGQFIKGLNKPDLSIYKVKTDILGHKYYIKKEGDKPKLNFENKIKNK

SEQ ID NO: 751 - protein, 1125 aa, Streptococcus mutans
MTNGKILGLDIGIASVGVGIINAKTGNVEHASSRIFPAANADNNVERRSARGGRRLIRRKKHRLKRVEDLFEKYNIDTDFSNLNLNPYQLRVKGLNEQLSNEELFAILKNIAKRRGISYLDDAEDDSVGSSDYAKAIDENRKLLKKQTPGEIQLKRLEKYGQLRGNFTIQDENGEYHRLINVFSTSDYVKEARRILETQSYYNKFITESFVEDYIKILQGKRKYYVGPGNEKSRTDYGIYRTDGETLDNLFGILIGKCGFYPEEYRAAKASYTAQEYNFLNDLNNLTVPTETKKLSTEQKYQLVDFAKTASTLGAAKLLKEIAKLVGCQVEEIKGYRLDNKDKPDLHTFEPFRKLKSNLTTIAVENLSITTLDTLAHILTLNTEREGIEEAIQKELPNIFSDEQITEIIAVRKKNSQIFGKGWHSFSIKLMKELIPELYETSEEQMTILTRLKKVKTNSKITNRTKYINEEEITDEIYNPVVSKSIRQTVKIINATIKKYGAFDQIIIEMPRESNEEDERKFIADLQKSNAKEKDDAMKQAALLYNGKDELPHDVFHGHKELATKIRLWYQQGERCLYSGKHIDIHDLIHNQHMFEIDHVLPLSLSFDDSLANKVLVYSWANQEKGQRTPFQALPQMASAWSFRELRDYISKQKGISKKKRDYLLTEQDINKVEVKQKFIERNLVDTRYVSRVVLNTLQDALKVMNKETKISVIRGQFTSQLRRQWRIDKSRETYHHHAVDALIIAASSQLRLWKKQNNPMFAEDKHGQKINLDTGEVLSDDAYKELVYQAPYQGFVNTISSKSFEDEILFSYQVDSKVNRKISDATIYATRQAQLGKDKKEETYVLGKIKDIYSQAGYDAFRKKYDKDKAVFLMYQKDPETWEKVIEVILRDYKELDDKGKEIGNPFERYKVKHGFVRKYSRKNKGTEIKSLKYYDNKLGNHIDITPNNSKHSVVLQSINPWRADLYFNPETTKYELMGLKYADLSFEKGTGKYSISREKYDEIKEREGISSKSEFKFTLYKNDLILVKDIGNHKELIARFNSKNDTSKHYVELKPWNKAKFDSEEELIPAFGKVAKSGQFIKGLNKPDLSIYKVKTDILGHKYYIKKEGDKPKLNFENKIKNK

SEQ ID NO: 752 - protein, 1125 aa, Streptococcus mutans; identical to SEQ ID NO: 751

SEQ ID NO: 753 - protein, 1125 aa, Streptococcus mutans; identical to SEQ ID NO: 750

SEQ ID NO: 754 - protein, 670 aa, Streptococcus oralis
MAKFNKNYSIGLDIGVSSVGYAVVTEDYRVPAFKFKVLGNTEKEKIKKNLIGSTTFVPAQSAQGTRVFRVNRRRIDRRNHRIAYLRDIFQKEIGKIDKNFYRRLDESFRVLGDKSEDIQIKQPFFGNKELETAYHKKYPTIYHLRKHLADADKNSPVADIREVYMALSHIFKYRGHFLTLGKIDPNNINMQNSWIDFIESCQDAFDLEISDESKTIAAIFKSSDNRQEKVKGILSYFQPELAKKDKSIFKQLLQLLFGLKTKFKECFELEEEPDLNFSKENYDENLENLLGTLEEDFPDVFAKLKILRDTILLSDMLTYTGATHARFSATMVERYEEHRKDLQRFKSFVKQNLSEQDYLDIFGRKTPNGFDVDKETKGYVGYISNKMVLTNKQKTIQQNFYDYISGKITGIEGAEYFLNKISDGTFLRKLRTTDNGTIPNQIHAYELEKIIERQGRDYPFLLENKDKLLSILTFKIPYYVGPLAKGNNSRFAWIKRTTSQDVLDNNDEDTKNGKIRPWNYHKLINMDETRDAFITNLIGNDIILLNEKVLPKRSLIYEEVMLQNELTRIKYKDKYGKIHFFDSELRQEIINNLFKTNSKRVSSAMLLAYLENFTNLQAVEIVSGIEKGKSLNSTLKTYNDLKTIFSEDLLDSEIYQKELEEIIKVITVFV

SEQ ID NO: 755 - protein, 1373 aa, Streptococcus oralis
MENKNYSIGLDIGTNSVGWAVITDDYKVPSKKMKVLGNTDKRFIKKNLIGALLFDEGTTAEARRLKRTARRRYTRRKNRLRYLQEIFAEEMSKVDSSFFHRLDDSFLIPEDKKGSKYPIFATLIEEKEYHKQFPTIYHLRKQLADSKEKTDLRLIYLALAHMIKYRGHFLYEDTFDIKNNDIQKIFNEFISIYNNTFEGNSLSGQNVQVEAIFTDKISKSAKRERVLKLFPDEKSTGLFSEFLKLIVGNQADFKKHFDLEEKAPLQFSRDTYDEDLENLLGQIGDDFADLFVAAKKLYDAILLSGILTVTDPSTKAPLSASMIERYENHQKDLATLKQFIKTNLPEKYDEVFSDQSKDGYAGYIDGKTTQESFYKYIKNLLSKFEGADYFLEKIEREDFLRKQRTFDNGSIPHQIHLQEMNAILRRQGEHYPFLKENKEKIEKILTFRIPYYVGPLARGNRDFAWLTRNSDQAIRPWNFEEIVDKASSAESFINKMTNYDLYLPEEKVLPKHSLLYETFAVYNELTKVKFIAEGLRDYQFLDSRQKKDIFYTLFKAEDKRKVTEKDIIQYLHTVDGYDGIELKGIEKQFNASLSTYHDLLKIIKDKEFMDDPNNEEILENIVHTLTIFEDREMIKQRLAQYDSLFDEKVIKALTRRHYTGWGKLSSKLINGIRDKQTGKTILDYLMDDGYNNRNFMQLINDDELSFKEIIKKAQVVGKTDDVKQVVQELPGSPAIKKGILQSIKLVDELVKVMGHEPESIVIEMARENQTTARGKKNSQQRYKRIEDSLKILASGLNAKILKEHPTDNIQLQNDRLFLYYLQNGRDMYTGKPLDINQLSSYDIDHIVPQAFIKDDSLDNRVLTSLKDNRGKSDNVPSLEVVEKMKTFWQQLLDSKLISYRKFNNLTKAERGGLDERDKVGFIKRQLVETRQITKHVAQILDARYNTEVNEKDKKNRTVKIITLKSNLVSNFRKEFRLYKIREINDYHHAHDAYLNAVVAKAILKKYPKLEPEFVYGDYQKYDLKRYISRSKDPKEIEKATEKYFFYSNLLNFFKEEVHYADGTIVKRENIEYSKDTGEIAWNKEKDFATIKKVLSLPQVNIVKKREVQTGGFSKESILPKGNSDKLIPRKTKDILWDTTKYGGFDSPVIAYSILLIADIEKGKAKRLKTVKTLVGITIMEKATFEKSPIAFLENKGYHNVRKENILCLPKYSLFELKNGRRRMLASAKELQKGNEIVLPVHLTTLLYHAKNIHRLDEPEHLEYIQKHRNEFKGLLNLVSEFSQKYVLADANLEKIKNLYADNEQADIEILANSFINLLTFTALGAPAAFKFFGKDVDRKRYTTVSEILNATLIHQSITGLYETRIDLSKLGED

SEQ ID NO: 756 - protein, 1371 aa, Streptococcus oralis
MENKNYSIGLDIGTNSVGWSVITDDYKVPSKKMKVLGNTDKRFIKKNLIGALLFDEGTTAEARRLKRTARRRYTRRKNRLRYLQEIFAEEMSKVDSSFFHRLDDSFLIPEDKRGSKYPIFATLAEEKEYHKQFPTIYHLRKQLADSKEKTDLRLIYLALAHMIKYRGHFLYEDTFDIKNNDIQKIFSEFISIYDNTFEGSSLSGQNAQVEAIFTDKISKSAKRERVLKLFPDEKSTGLFSEFLKLIVGNQADFKKHFDLGEKAPLQFSKDTYDEDLENLLGQIGDDFADLFLVAKKLYDAILLSGILTVTDPSTKAPLSASMIERYENHQKDLAVLKQFIKNNLPEKYDEVFSDQSKDGYAGYIDGKTTQEAFYKYIKNLLSKFEGTDYFLEKIEREDFLRKQRTFDNGSIPHQIHLQEMNAILRRQGEHYPFLKDNKEKIEKILTFRIPYYVGPLARGNRDFAWLTRNSDEAIRPWNFEEIVDKASSAEDFINKMTNYDLYLPEEKVLPKHSLLYETFAVYNELTKVKFIAEGLRDYQFLDSGQKKQIVTQLFKEKRKVTEKDIIQFLHNVDGYDGIELKGIEKQFNASLSTYHDLLKIIKDKEFMDDSKNEEILENIVHTLTIFEDREMIKQRLAQYDSLFDEKVIKALIRRHYTGWGKLSAKLIDGICDKQTGNTILDYLIDDGKNNRNFMQLINDDGLSFKEITQKAQVVGKTDDVKQVVQELPGSPAIKKGILQSIKIVDELVKVMGHTPESIVIEMARENQTTARGKKNSQQRYKRIEDALKNLASGLDSNILKEHPTNNIQLQNDRLFLYYLQNGRDMYTGKPLDINQLSSYDIDHIVPQAFIKDDSLDNRVLTSLKDNRGKSDNVPSIEVVQKRKAFWQQLLDSKLISERKFNNLTKAERGGLDERDKVGFIKRQLVETRQITKHVAQILDARFNKEVNEKDKKNRTVKIITLKSNLVSNFRKEFRLYKVREINDYHHAHDAYLNAVVAKAILKKYPKLEPEFVYGDYQKYDLKRYISRSRNPKEVEKATEKYFFYSNLLNFFKEEVHYADGTIVKRENIEYSKDTGEIAWNKEKDFATIKKVLSYPQVNIVKKREVQTGGFSKESILPKGNSDKLIPRKTKDILWETTKYGGFDSPVIAYSILLIADIEKGKAKKLKTVKTLVGITIMEKAAFEENPITFLENKGYHNVRKENILCLPKYSLFELENGRRRLLASAKELQKGNEIVLPVYLTTLLYHSKNVHKLDEPEHLEYIQKHRNEFKDLLNLVSEFSQKYVLADANLEKIQNLYADNEQADIEILANSFINLLTFTALGAPAAFKFFGKDIDRKRYTTVSEILNATLIHQSITGLYETRIDLSKLGED

SEQ ID NO: 757 - protein, 1121 aa, Streptococcus oralis
MNGLVLGLDIGIASVGVGILEKNSGKIIHANSRLFPAATADNNVERRKNRQARRLNRRKKHRGVRFQDLFEDYGLLTDFSKVSINLNPYRLRVDGLNQQLTNEELFIALKNIVKRRGISYLDDASEDGGAVSSDYGKAVEENRKLLAEQTPGQIQLERFEKYGQVRGDFTVVENGEKCRLINVFSTSAYRKEAEKILRKQQEFNNQITDEFIEDYLKILTGKRKYYHGPGNEKSRTDYGRFRTDGTTLDNIFGVLIGKCTFYPNEYRASKSSYTAQEFNLLNDLNNLTVPTETKKLSEEQKKVIVEYAKEAKTLGASTLLKYIVKMIDASVDQISGYRVDVNNKPEMHTFEVYRKMQSLETISVGELSRNVLDELAHILTLNTEREGIEEAINSKLMGVFSQDQVLELVQFRKNNSSLFSKGWHNFSLKLMMELIPELYETSEEQMTILTRLGKQKSKETSKRTKYIDEKELTEEIYNPVVAKSVRQAIKIINEATKKHGIFDNIVIEMARENNEEDAKKDYIKRQKANQDEKNAAMEKAAFQYNGKKELPGNIFNGHKELATKIRLWHQQGEKCLYTGKTIPISDLIHNQYKYEIDHILPLSLSFDDSLSNKVLVHATANQEKGQRTPFQALDSMDDAWSYREFKSYVKDLKSLSNKKKDYLLTEEDISKIEVKQKFIERNLVDTRYSSRVVLNALQDFYKSHQFDTTISVVRGQFTSQLRRKWGLEKSRETYHHHAVDALIIAASSQLRLWKKQNNPLITYKEGQFVDSQTGEIISLTDDEYKELVFKAPYDHFVDTLHSKTFEDGILFSYQVDSKYNRKISDATIYATRKAKLDKDKSEETYVLGKIKDIYSQAGYDAFIKIYNKDKRKFLMYHKDPQTFEKVIEEILRTYPSKERNDKNKEVPCNPFEKYRQENGPIRKYSKKGNGPEIKCLKYYDNKLGNYIDISPDGSDNQVVLQSLKPWRTDVYFNHQTKEYELMGLKYSDLSFEKGSGKYSISNEKYNSIKRIEGVNEQSEFKFTLYKNDLILIKDSENNEQKLFRFNSRNDTAKHYVELKPYDKARFDGQQELITILGNVAKGGQCLKGLNKSNISIFKVKTDVLGKKHIIKKEGDEPKLKF

SEQ ID NO: 758 - protein, 1134 aa, Streptococcus oralis
MNGLVLGLDIGIASVGVGILEKNSGKIVHASSRIFPAATADNNVERRKNRQARRLHRRKKHRGARLKDLFEYYGLLTDFSKVSINLNPYRLRVDGLDQQLTNEELFIALKNIVKRRGISYLDDASEDGGTVSSDYGKAVEENRKLLAEQTPGQIQLERFEKYGQLRGDFTVVENSEKCRLINVFSTSAYKKEAERILRKQQEFNNQITDEFIEDYLKILTGKRKYYHGPGNEKSRTDYGRFRTDGATLDNIFGILIGKCTFYPNEYRASKASYTAQEFNLLNDLNNLTVPTETKKLSEEQKKTIIEYAKSAKTLGASTLLKYIAKMIDASVDQIRGYRVDVNNKPEMHTFEVYRKMQSLETISVGELSRNILDELAHILTLNTEREGIEEAINTKLRDSFSQDQVLELVQFRKNNSSLFSKGWHNFSLKLMMELIPELYETSEEQMTILTRLGKQKSKETSKRTKYIDEKEVTEEIYNPVVAKSVRQAIKIINEATKKHGIFDNIVIEMARENNEEDAKKDYIKRQKANQDEKYAAMEKAAFQYNGKKELPDNIFHGHKELATKIRLWHQQGEKCLYTGKSIPISDLIHNQYKYEIDHILPLSLSFDDSLSNKVLVLATANQEKGQRTPFQALDSMDDAWSYREFKSYVKESKLLGNKKKEYLLTEEDISKIEVKQKFIERNLVDTRYSSRVVLNALQDFYKNHNFDTTISVVRGQFTSQLRRKWGLEKSRETYHHHAVDALIIAASSQLRLWKKQNNPLIAYKEGQFVDSQTGEIISLTDDEYKELVFKAPYDHFVDTLSSKTFEDSILFSYQVDSKFNRKISDATIYATRKAKLDKEKKEYTYTLGKIKDIYSLGTKTPSKTGFYKFLDLYNKDKSQFLMFQKDRKTWDEVIEKIMEQYRPFKEYDKAGKLVDFNPFEKYRQENGPIRKYSKKGNGPEIKSLKYYDILLGKHKNITPEGSRNTVALLSLNPWRTDVYYNMETKKYEFLGLKYADLPFEEGGAYGISTETYNELREKEGIGKNSEFKFTLYKNDLILIKDTETNCQQFFRFWSRTGKDNPKSFEKHKIELKPYEKAKFEKGEELEVLGKVPPSSNQFQKNMQIENLSIYKVKTDVLGNKHFIKKEGDKPKLKF

SEQ ID NO: 759 - protein, 550 aa, Streptococcus oralis
MYSLDKNGSPTPLYRDQLNQYEVDHIIPYSFLPIDSIDNKVLTHRENNQRKLDNIPDKETVANMKPFWEKLYNAKLISQTKYQRLTTSERTPDGVLTESMKAGFIERQLVETRQIIKHVARILDNRFSDTKIITLKSQLVTNFRNTFHIAKIRELNDYHHAHDAYLAVVVGQTLLKAYPKLAPELIYGHHAHFNRHEENKATIRKYLYSNIMRFFNNPDSKVSKDIWDCNRDLPIIKDIIYNSQVNFVKRTMIKKGAFYNQNPVGKFNKQIAANNRYPLKTKVSSLDTSIYGGYGPMNSALSIIIIAERFNEKKCKIETVKEFHDIFIIDYKKFNNDPFQFLNDTSENGFLKKNNINRVLAFYRVPKYSLMQKIDGTRMLFESKSNLHKATQFKLTKTQNELFFHMRRLLTKSNLMDLKSESAIKESQNFILKHKEEFDNISNQLSAFSQKMLGDTTSLKNLIKGYNERKIKEINSSEETIKYFYDNFIKMFSFVKSGAPKDINDFFNNKYTVARMRPKPDKKLLNATLIHQSITGLYETRIDLSKLGED

SEQ ID NO: 760 - protein, 1140 aa, Streptococcus parasanguinis
MNGLVLGLDIGIASVGVGILKKDIGEIIHTNSRLFSAATADSNIERRGHRGGKRLTRRKKHRSIRLHDLFEDFGLLTDFSKVSINLNPYQLRVQGLDNQLTNEELFIALKNIVKRRGISYLDDASEDGGTVSSDYGKAVEENRKLLAEQTPGQIQLDRFEKYGQVRGDFNVVENGEKRRLINVFTTSAYSKEAERILRKQQEFNKKITDEFIEDYLTILTGKRKYYHGPGNEKSRTDYGRYTTKKDPEGKYITLDNIFGILIGKCTFYPDEYRASKASYTAQEFNLLNDLNNLTVPTETKKLSEEQKKTIIKYAKTAKTLGASTLLKYIAKLIGASVDQIHGYRIDPNKKPEMHTFETYRKMQSLETISVEELPRKVLDELAHILTLNTEREGIEEAINATLKDTFSQDQVLELVQFRKNNSSLFSKGWHSFSLKLMMELIPELYETSEEQMTILTRLGKQKSKETSKRTKYIDEKELTEEIYNPVVAKSVRQAIKIINEATKKYGIFDNIVIEMARENNEEDAKKEYIKRQKANLDEKNAAMEKAAFQYNGKKELPDNVFHGHKELATKIRLWHQQGEKCLYTGKNIPISDLIQNQYKYEIDHILPLSLSFDDSLSNKVLVLATANQEKGQRTPFQALDSMDDAWSYREFKSYVKDSKLLGNKKKEYLLTEEDISKIEVKQKFIERNLVDTRYSSRVVLNALQDFYKEHQFDTTISVVRGQFTSQLRRKWGLEKSRETYHHHAVDALIIAASSQLRLWKKQNNPLISYTEGQFVDQVTGEIISLSDDEYKELVFKAPYDHFVDTLKSKKFEDSILFSYQVDSKYNRKISDATIYATRKAKLDKENKEYTYTLGKIKDIYALGTKSPSKTGFYKFLDLYNKDKSQFLMFQKDRKTWDEVIEKIIEQYRPFKEYDENGKEVDFNPFEKYRIENGPIRKYSKKGNGPEIKSLKYYDNLLGKFVDITPSESKNPVALLSLNPWRTDVYYNTETSKYEFLGLKYADLCFEKGGAYGISEVKYNKIREKEGIGKESEFKFTLYKNDLILIKDTETNCQQIFRFWSRTGKDNPKSFEKHKIELKPYEKARFEKGEELEVLGKVPPSSNQLQKNMQIENLSIYKVKTDVLGNKHFIKKEGEEPKLKF

SEQ ID NO: 761 - protein, 1374 aa, Streptococcus pseudoporcinus
MKKRYSYSIGLDIGTNSVGWAVINEDYKVPAKKMTVFGNTDRKTIKKNLLGTVLFDSGETAQARRLKRTNRRRYTRRRYRLCQLQNIFATEMVKVDDTFFQRLSESFFYYQDKAFDKHPIFGNSKEERAYHKTYPTIYHLRKDLADRDQKADLRLIYLALSHIIKFRGHFLIEGKLNSENTDVQKLFIALVTVYNLLFEEEPIAGETCDAKALLTAKTSKSKRLESLISEFPGQKKNGLFGNLLALALGLRPNFKSNFGLSEDAKLQITKDTYEEELDNLLAEIGDHYADLFLAAKNLSDAILLSDILTLSDENTRAPLSASMIKRYEEHQEDLALLKKLVKEQMPEKYWEIFSNAKKNGYAGYIEGKVSQEDFYRYIKPILSRLKGGDEFLAKIDRDDFLRKQRTFDNGSIPHQIHLKELHAILRRQEKYYPFLAEQKEKIEQLLCFRIPYYVGPLAKGGNSSFAWLKRRSDEPITPWNFKDVVDEEASAQAFIEGMTNYDTYLPEEKVLPKHSPLYEMFTVYNELTKVKYIAENMTKPLYLSAEQKEAIIDHLFKQTRKVTVKDLKEKYFSQIEGLENVDVTGVEGAFNASLGTYNDLLKIIKDKAFLDDEANAEILEEIVLILTLFQDEKLIEKRLAKYANLFEKSVLKKLRKRHYRGWGRLSRQLIDGMKDKASGKTILDFLKADDFANRNFIQLINDSSLDFEKLIDDAQKKAIKRESLTEAVANLAGSPAIKKGILQSLKVVDEIVKVMGHNPDNIVIEMSRENQTTAQGLKNARQRLKKIKEVHKKTGSRILEDNSERITNLTLQDNRLYLYLLQDGKDMYTGQDLDINNLSQYDIDHIIPQSFIKDNSIDNLVLTTQKANRGKSDNVPSIEVVRDMKDRVWRRQLANGAISRQKFDHLTKAERGGLADSDKARFLRRQLVETRQITKHVAQLLDSRFNSKSNQNKKLARNVKIITLKSKIVSDFRKDFGLYKLREVNNYHHAHDAYLNAVVGTALLKKYPKLEAEFVYGDYKHFDLVKLISKSDPSLGKATAKVFFYSNIMNFFKEELSLADGTLMKRPVIETNTETGEVVWDKVKDFKTIRKVLSYPQVNIVKKTEIQSGAFSKESVLSKGNSDKLIERKKGWDPKKYGGFDSPNTAYSIFVVAKVAKRKAQKLKTVKEIVGITIMEQAEYEKDNIAFLEKKGYQDIQEKLLIKLPKYSLFELENGRRRLLASANEFQKGNELALSGKYMKFLYLASRYDKLSSKIESEQQKKLFVEQHLHYFDEILDIVVKHATCYIKAENNLKKIISLYKKKEAYSINEQALNMLNLFIFTSLGAPSTFVFFDETIDRKRYTTSSDVLNGILIQQSITGLYETRIDLSRFGGD

SEQ ID NO: 762 - protein, 1052 aa, Streptococcus pyogenes
LSASMIKRYDEHHQDLTLLKALVRQQLPEKYKEIFFDQSKNGYAGYIDGGASQEEFYKFIKPILEKMDGTEELLAKLNREDLLRKQRTFDNGSIPHQIHLGELHAILRRQEDFYPFLKDNREKIEKILTFRIPYYVGPLARGNSRFAWMTRKSEETITPWNFEEVVDKGASAQSFIERMTNFDKNLPNEKVLPKHSLLYEYFTVYNELTKVKYVTEGMRKPAFLSGEQKKAIVDLLFKTNRKVTVKQLKEDYFKKIECFDSVEISGVEDRFNASLGTYHDLLKIIKDKDFLDNEENEDILEDIVLTLTLFEDREMIEERLKTYAHLFDDKVMKQLKRRRYTGWGRLSRKLINGIRDKQSGKTILDFLKSDGFANRNFMQLIHDDSLTFKEDLQKAQVSGQGDSLHEHIANLAGSPAIKKGILQTVKVVDELVKVMGRHKPENIVIEMARENQTTQKGQKNSRERMKRIEEGIKELGSDILKEYPVENTQLQNEKLYLYYLQNGRDMYVDQELDINRLSDYDVDHIVPQSFLKDDSIDNKVLTRSDKNRGKSDNVPSEEVVKKMKNYWKQLLNAKLITQRKFDNLTKAERGGLSELDKAGFIKRQLVETRQITKHVAQILDSRMNTKYDENDKLIREVRVITLKSKLVSDFRKDFQFYKVREINNYHHAHDAYLNAVVGTALIKKYPKLESEFVYGDYKVYDIRKMIAKSEQEIGKATAKYFFYSNIMNFFKTEITLANGEIRKRPLIETNGETGEIVWDKGRDFATVRKVLSMPQVNIVKKTEVQTGGFSKESILPKRNSDKLIARKKDWDPKKYGGFDSPTVAYSVLVVAKVEKGKSKKLKSVKELVGITIMERSSFEKDPVDFLEAKGYKEVRKDLIIKLPKYSLFELENGRKRMLASAGELQKGNELALPSKYVNFLYLASHYEKLKGSPEDNEQKQLFVEQHKHYLDEIIEQISEFSKRVILADANLDKVLSAYNKHRDKPIREQAENIIHLFTLTNLGAPAAFKCFDTTIGRNRYKSIKEVLDATLIHQSITGLYETRIDLSQLGGD

SEQ ID NO: 763 - protein, 1368 aa, Streptococcus pyogenes; identical to SEQ ID NO: 51

SEQ ID NO: 764 - protein, 1367 aa, Streptococcus pyogenes; identical to SEQ ID NO: 255

SEQ ID NO: 765 - protein, 1368 aa, Streptococcus pyogenes [sequence omitted]

SEQ ID NO: 766 - protein, 1370 aa, Streptococcus ratti
MKKPYSIGLDIGTNSVGWAVITDDYKVPAKKMKVLGNTDKNYIKKNLLGALLFDSGNTAEDRRLKRTARRRYTRRRNRLLYLQDIFSDEMNKVDESFFHRLEDSFLVSEDKRGDHHPIFGNVVDEVKYHEQFPTIYHLRKYLADTPEKADLRLVYLALAHMIKFRGHFLIDDPKLDVKNTDSQELFSQFLTAYDVTQEDSHLADVKINISDIITEKMNKSRKVEALLFHFPSQKKNSFFGNLVSLVFGLLPNFKTNFNLAEDAKLQLSKDSYDEDLENLLGQIGDEYTDVFVAARKLYDSILLSGILTVNDLSTKAILSASMVRRYEEHNKDLAKLKAFVKANFTHDVFKEVFSDASKNGYAGYIEGKTSQEDFYKYVKNLIGKVDGSADFIEKIDREDFLRKQRTFDNGSIPHQVHLAEMKAILRRQGEYYPFLKEHAEKIQQILTFRIPYYVGPLDRHGHSDFAWASFNSEEKVTPWNFEEIIDKNKSAQAFIERMTNQDLYLPNEKVLPKHSPLYEKYTVYNELTKIKYVTETGTAKFFDANLKQEIFDGLFKKERKVTKRKLLTFLEKNFDEFRIVDIQGLDKETETFNASYGIYQDLLKIIKDKAFMDDSENADILEDIVLTLTLFEDREMIKQRLAKYADLFDKKVIDNLARRRYTGWGRLSAKLLNGIRDKRSRKTIMDYLVDDGRSNRNLMQLITDDNLTFKDEIAKAQYSDNSDDLHQVVQDLAGSPAIKKGILQSVKIVDELVKVMGYEPEQIVVEMARENQTTAKGRRNSQQRYKRLEEAIKNLDRDLNYKILKEHPTDNQALQNDRLFLYYLQNGRDMYTGESLDINRLSDYDIDHIIPQAFIKDNSIDNRVLVSSAKNRGKSDDVPSEDVVNRMRPFWNKLLNCGLISQRKYSNLTKKELTPNDKAGFIKRQLVETRQITKHVARILDEHFNKEFDEDKKRIRKVKVVTLKSNLVSNFRKEFELYKVREINDYHHAHDAYLNAVVAKALLMKYPKLEPEFVYGEYPKYNSYRERKTATQRMFFYSNIMNMFKSKVKLADERIIERPMIEVNDETGEIAWDKTKHIATVKKVLSYPQINIVKKVEEQTGGLTNETIYPRGSFDKLLNRKNTLEASKYGGFGSPTVAYCVLVVADSKNENGKVKKLKLGSELLGITILEKNDFENNSLDFLSRKGYQGVQEKKIIKLPKYSLFEFQDGSRRMLSSVMANDNKRGDLQKANEMILPAYLVKLLYHAKHINSVGEPAHKNYINEHCSEFQDLLNYIRQFADKFVDVDKNLSKIRSLSKSMAEYSVSEICSSFVNLLTLTALGAPADFKFFGTTIPRKRYGSPQSILSATLIHQSITGLYETRIDLSKLGED

SEQ ID NO: 767 - protein, 1135 aa, Streptococcus salivarius
MSDLVLGLDIGIGSVGVGILNKVTGEIIHKNSRIFPAAQAENNLERRTNRQGRRLTRRKKHRRVRLNHLFEESGLITDFTKVSINLNPYQLRVKGLTAELSNEELFIALKNMVKHRGISYLDDASDDGNSSVGDYAQIVKENSKQLETKTPGQIQLERYQKYGQLRGDFTVEEDGRKHRLINVFPTSAYHAEALRILQTQQEFNPQITDEFINSYLEILTGKRKYYHGPGNEKSRTDYGKYTTKKDAQGQYITLNNIFGILIGKCTFYPEEYRAAKASYTAQEFNLLNDLNNLTVPTETKKLSEEQKYQIITYVKNEKAMGPAKLFKYIAKLLACDIADIKGYRIDKSDKAEIHTFEAYRKMKTLETIDIEQIEREKLDKLAYVLTLNTEREGIQEALDHEFADGTFSQEQVDELVQFRKANSSIFGKGWHSFSVKLMMELIPELYATSEEQMTILTRLGKQKTTSSSNKTKYIDEKQLTEEIYNPVVAKSVRQAIKIVNAAIKKYGDFDNIVIEMARETNEDDEKKAIQKIQKANKAEKDAAMRKAANQYNGKAELPHSVFHGHKQLATKIRLWHQQGERCLYTGKTISIHDLINNPNQFEIDHILPLSITFDDSLANKVLVYATANQEKGQRTPYQALDSMDDAWSFRELKAFVRESKALSNKKKEYLLTEEDISKFDVRKKFIERNLVDTRYASRVVLNALQEHFKAHKIDTKVSVVRGQFTSQLRRHWGIDKTRDTYHHHAVDALIIAASSQLNLWKKQKNTLVSYSEDQLLDIETGELISDDEYKESVFKAPYQHFVDTLKSKEFEDSILFSYQVDSKFNRKISDATIYATRQAKVGKDKKDETYVLGKIKDIYALGTKTPSKTGFYKFLDLYNKDKSQFLVYQKDRKTWDEVIEKIMEQYRPFKESDKNGKEVDFNPFEKYRIENGPIRKYSRKGNGPEIKSLKYYASKLGNHIDITPKDSNNKVVLQSVSPWRADVYFNKTTGSYEILGLKYADLQFEKGTGTYRISEEKYNDIKKKEGVDSDSEFKFTLYKNDLLLIKDTETKEQRLFRFLSRSMPNKKHYVELKPYSKDKFEKNESLIEILGSADKSGRCIKGLAKSNLSIFKVRTDVLGNQHIIKNEGDKPKLDF

SEQ ID NO: 768 - protein, 1127 aa, Streptococcus salivarius
MSDLVLGLDIGIGSVGVGILNKVTGEIIHKNSRIFPAAQAENNVERRINRQGRRLTRRKKHRRVRLNHLFEESGLITDFTNVSINLNPYQLRVKGLTDELSNEELFIALKNMVKHRGISYLDDASDDGNSSVGDYAQIVKENSKQLETKTPGQIQLERYQKYGQLRGDFTVEEDGKKHRLINVFPTSAYRAEALRILQTQQEFNPQITDEFINSYLQILTGKRKYYHGPGNEKSRTDYGRYTTKKDSEDEYITLDNIFGILIGKCTFYPEEYRAAKASYTAQEFNLLNDLNNLTVPTETKKLSEEQKNQIITNVKNEKAMGPAKLFKYIAKLLSCDVADIKGYRIDKSDKAEIHTFEAYRKMKTLATIDIEQMERENLDKLAYVLTLNTEKEGIQEALEHEFADGTFSQEQIDELVQFRKANSSIFGKGWHSFSVKLMMELIPELYATSEEQMTILTRLGKQKTTSSSNKTKYIDEKQLTEEIYNPVAAKSVRQAIKIVNAAIKEYGDFDNIVIEMARETNEDDEKKAIQKIQKANKDEKDAAMLKAANQYNGKAELPHSVFHGHKQLATKIRLWHQQGERCLYTGKTISIHDLINNSNQFEIDHILPLSITFDDSLANKVLVYATANQEKGQRTPYQALDSMDDAWSFRELKAFVRDSKALSNKKKEYLLTEEDISKFDVRKKFIERNLVDTRYASRVVLNALQEHFRVHKTDTKVSVVRGQFTSQLRRHWGIEKTRDTYHHHAVDALIIAASSQLNLWKKQKNTLVSYSEDQLLDIETGELISDDEYKESVFKAPYQHFVDTLKSKEFEDSILFSYQVDSKFNRKISDATIYATRQAKVGKDKKDETYVLGKIKDIYSQTGYDAFIKIYKKDKSKFLMYRHDPQTFEKVIEPILENYPNKELNEKGKEVPCNPFLKYKEDHGYIRKYSKKGNGPEIKSLKYYDSKLGNHIDITPKNSNNKVVLQSVSPWRADVYFNKTTGKYEILGLKYADLKFEKGTGTYKISEEKYNDIKIKEGVDSDSEFKFTLYKNDLLLIKDTETKEQQLFRFLSRTMPNVKHYVELKPYDKQKFDDNEELIKILGIVAKGGQCKKGVSKPNISIYKIRTDVLGNQHIIKNEGDKPKLDF

SEQ ID NO: 769 - protein, 1385 aa, Streptococcus salivarius
MTKPYSIGLDIGTNSVGWAVITDDYKVPSKKMKVLGNTSKKYIKKNLLGALLFDSGITAEGRRLKRTARRRYTRRRNRILYLQEIFSTEMATLDDAFFQRLDDSFLVPDDKRDSKYPIFGNLVEEKVYHDEFPTIYHLRKHLADSSKKADLRLVYLALAHMIKYRGHFLIEGDFNSKNNDLQKNFQDFLDTYNAIFESDLSLENSKQLEEIVKDKISKSAKKDRILKLFPGEKNSGIFSEFLKLIVGNQADFRKYFNLDEKTSLQFSKESYDEDLETLLGHIGDDYSDVFLKAKKLYDAILLSGILTVTDNGTEAPLSSAMIMRYKEHEEDLALLKAYIRNISLETYNEVFKDNTKNGYAGYIDGKTSQEDFYVYLKRLLAGLEGADYFLEKIDREDFLRKQRTFDNGSIPYQIYLQEMRAILDKQAKFYPFLAKNKERIEKILTFRIPYYVGPLARGNSDFAWSIRKRNEKITPWNFEDVIDKESSAEAFINRMTSFDLYLPEEKVLPKHSLLYENFTVYNELTKVRFIAEGMRDYQFLDSKQKKDIVRLYFKGKRKVTDKDIIEYLHAIDGYDGIELKGIEKQFNSSLSTYHDLLNIINDKEFLDDSSNETIIEEIIHTLTMFEDREMIKQRLSKFDNIFDKSVLKKLSRRHYTGWGKLSAKLINGIRDEKSGNTILDYLIDDGVSNRNFMQLIHDDALSFKKKIKKAQIIGDKDNIKQVVKSLPGSPAIKKGILQSIKIVDELVKVMGREPESIVVEMARENQYTNQGKSNSQQRLKRLEESLKGLGSKILKENVPTRLSKIDNNALQNDRLYLYYLQNGKDMYTGEELDIDRLSNYDIDHIIPQAFLKDDSIDNKVLVSSASNRGKSDDVPSLEVVKKRKTLWYQLLKSKLISQRKFDNLTKAERGGLSQEEKAGFIQRQLVETRQITKHVARLLDERFNNKKDENNRTLRTVKIITLKSSLVSQFRKDFELYKVREINDFHHAHDAYLNAVVASALLKKYPKLEPEFVYGDYPKYNSFRERKSATEKVYFYSNIMNIFKKSIPLADGTVIDRPLIEVNEETGESVWNKVADLNTVRKVLSYSQVNIVKKVEEQNHGLDRGKPKGLFNANLSSKPKPNSKENLVGAKEYLDPKKYGGYAGISNSFAILVKGTIEKGAKKKITNVLEFQGISILDRIYYRKDKLNFLLEKGYKDIELIIELPKYSLFELSDGSRRMLASILSTNNKRGEIHKGNQIFISQKFVKLLYHAKRISSTFNENHRKYVENHKKEFEELFYYILEFNENYVGAKKNGELLKSAFQSWQNHSIDELCSSFIGPTGSERKGLFELTSRGGAADFEFLGVKIPRYRDYTPSSLLKDATLIHQSVTGLYETRIDLGKLGED

SEQ ID NO: 770 - protein, 1392 aa, Streptococcus sanguinis
MENKNYSIGLDIGTNSVGWAVITDDYKVPSKKMKVFGNTDKHFIKKNLIGALLFDEGATAEDRRLKRTARRRYTRRKNRLRYLQEIFSEEISKLDSSFFHRLDDSFLVPKDKRGSKYPIFATLEEEKEYHKKFPTIYHLRKHLADSKEKTDLRLIYLALAHMIKYRGHFLYEESFDIKNNDIQKIFNEFISIYDNTFEGSSLSGQNAQVEAIFTDKISKSAKRERVLKLFSDEKSTSLFSEFLKLIVGNQADFKKHFDLEEKAPLQFSKDTYDEDLENLLGQIGDGFTDLFLVAKKLYDAILLSGILTVTDPSTKAPLSASMIERYESHQKDLAALKQFIKNNLPKRYNEVFSDQSKDGYAGYIDGKTTQEAFYKYIKNLLSKFEGADYFLDKIEREDFLRKQRTFDNGSIPHQIHLQEMNAILRRQGEHYPFLKENREKIEKILTFRIPYYVGPLARGNRDFAWLTRNSDQAIRPWNFEEIVDKASSAEEFINKMTNYDLYLPEEKVLPKHSLLYETFAVYNELTKVKFIAEGLRDYQFLDSGQKKQIVNQLFKEKRKVTEKDIIHYLHNVDGYDGIELKGIEKQFNASLSTYHDLLKIIKDKEFMDDPKNEEILENIVHTLTIFEDREMIKQRLAQYDSIFDEKVIKALTRRHYTGWGKLSAKLINGICDKQTGDTILDYLIDDGKINRNFMQLINDDGLSFKEIIQKAQVVGKTDDVKQVVQELPGSPAIKKGILQSIKIVDELVKVMGYAPESIVIEMARENQTTARGKKNSQQRYKRIEDSLKNLAPGLDSNILKENPTDNIQLQNDRLFLYYLQNGKDMYTGKPLDIDQLSSYDIDHIIPQAFIKDDSIDNRVLTSSKDNRGKSDNVPSLEVVQKRKAFWQQLLDSKLISERKFNNLTKAERGGLDERDKVGFIRRQLVETRQITKHVAQILDASFNTEVNEKNQKIRTVKIITLKSNLVSNFRKEFELYKVREINDYHHAHDAYLNAVVAKAILKKYPKLEPEFVYGDYQKYDLKRYISRFKPSKEIEKATEKYFFYSNLLNFFKEEVHYADGIIVKRENIEYSKDTGEIAWNKEKDFATIKKVLSYPQVNIVKKTEIQTHGLDRGKPKGLFNSNPSPKPSEDSKENLVPIKQGLDPRKYGGYAGISNSYAVLVKAIVEKGAKKQQKTILEFQGISILDKINFENNKENYLLKKRYIEILSTITLPKYSLFEFPDGTRRRLASILSTNNKRGEIHKGNELVLPGKYTTLLYHAKNINKKLEPEHLEYVEKHRNDFAKLLECVLNFNDKYVGALKNGERIRQAFTDWETVDIEKLCFSFIGPENSKNAGLFELTSQGSASDFEFLGVKIPRYRDYAPSSLLKATLIHQSITGLYETRIDLSKLGED

SEQ ID NO: 771 - protein, 1377 aa, Streptococcus sanguinis
MKKPYSIGLDIGTNSVGWAVITDDYKVPSKKMKVLGNTDKHFIKKNLIGALLFDEGTTAEDRRLKRTSRRRYTRRKNRLRYLQEIFSEEISKLDSSFFHRLDDSFLVPEDKRGSKYPIFATLEEEKEYHKKFPTIYHLRKHLADSKEKTDLRLIYLALAHMIKYRGHFLYEESFDIKNNDIQKIFNEFISIYDNTFEGSSLSGQNAQVEAIFTDKISKSTKRERVLKLFSDEKSTGLFSEFLKLIVGNQADFKKHFDLEEKAPLQFSKDTYDEDLENLLGQIGDGFADLFLVAKKLYDAILLSGILTVTDPSTKAPLSASMIERYENHQEDLAALKQFIKNNLSEKYAEVFSDQSKDGYAGFIDGKTTQEAFYKYIKNLLSKLEGADYFLNKIEREDFLRKQRTFDNGSIPHQIHLQEMNAILRRQGEHYLFLKENREKIEKILAFRIPYYVGPLARGNRDFAWLTRNSDQAIRPWNFEEVVDKASSAEDFINKMTNYDLYLPEEKVLPKHSLLYETFAVYNELTKVKFIAEGLRDYQFLDSGQKKQIVNQLFKDKRKVTEKDIIHYLHNVDGYDGIELKGIEKQFNASLSTYHDLLKIIKDKEFMDNPKNGEILENIIHTLTIFEDREMIKQRLAQYDTLFDEKVIKALTRRHYTGWGKLSAKLINGIRDKQTGKTILEYLIDDGDCNRNFMQLINDDGLSFKEIIQKAQVVGKTDDVKQVVQEIPGSPAIKKGILQSIKIVDELVKVMGHNPESIVIEMARENQTTAKGKKNSQQRYKRIEDALKNLAPGLDSNILKENPTDNIQLQNDRLFLYYLQNGKDMYTGKAIDINQLSNYDIDHIIPQAFIKDDSLDNRVLTSSKDNRGKSDNVPSIEVVQKRKAFWQQLLDSKLISERKFNNLTKAKRGGLDERDKVGFIKRQLVETRQITKHVAQLLDTRFNTEVNEENQKIRTVKIITLKSNLVSNFRKEFGLYKVREINDYHHAHDAYLNAVVAKAILKKYPKLEPEFVYGDYQKYDLKRYILKSKASNTIDKATEKYFFYSNLLNFFKEKVRYADGTIKKRENIEYSNDTGEIAWNKEKDFATIKKVLSLPQVNIVKKTEEQTVGQNGGLFDNNIVSKKKVVDASKLIPIKSSLSPEKYGGYARPTIAYSVLVIADIEKGKGKAKKLKRIKEIVGITIQDKKKFESNPVTYLEECGYKNINSNLIIKLPKYSLFEFNDGQRRLLASSIELQKGNELILPYHLTALLYHAQRINKISEPIHKQYVEAHQNEFKELLTTIISLSKKYIQKPNVELLLQQAFDQADKDIYQLSESFISLLKLTSFGAPGAFKFLGVEISQSSVRYKPNSQFLDTTLIHQSITGLYETRIDLSKLGED

SEQ ID NO: 772 - protein, 1370 aa, Streptococcus sanguinis
MKKPYSIGLDIGTNSVGWAVVTDDYKVPAKKMRVFGDTDRSHIKKNLLGTLLFDDGNTAESRRLKRTARRRYTRRRNRILYLQEIFTESMNEIDESFFHRLDDSFLVPEDKRGSKYPIFATLQEEKEYHKQFPTIYHLRKQLADSKEKSDVRLIYLALAHMIKYRGHFLYEETFDIKNNDIQKIFNEFINIYDNTFEGSSLSGQNAQVEAIFTDKISKSAKRERVLKLFPDEKSTGLFSEFLKLIVGNQADFKKHFDLEEKAPLQFSKDTYDEELENLLGQIGDDFADLFLIAKKLYDAILLSGILTVTDPSTKAPLSASMIERYENHQKDLAALKQFIKNNLPEKYVEVFSDQSKDGYAGYIDGKTTQEAFYKYIKNLLSKFEGADYFLDKIEREDFLRKQRTFDNGSIPHQIHLQEMNAILRRQGEHYPFLKENREKIEKILTFRIPYYVGPLARDNRDFSWLTRNSDEPIRPWNFEEVVDKARSAEDFIHRMTNYDLYLPEEKVLPKHSLLYETFAVYNELTKVKFIAEGLRDYQFLDSGQKKQIVNQLFKEKRKVTEKDIIHYLHNVDGYDGIELKGIEKQFNANLSTYHDLLKITKDKEFMDDPKNEEILENIVHTLTIFEDREMIKQRLAQYDTLFDEKVIKALTRRHYTGWGKLSAKLINGIRDKQSGKTILDYLIDDDKINRNFMQLINDDGLSFKEIIQKAQVVGKTDDVKQVVQELPGSPAIKKGILQSIKIVDELVKVMGYALESIVIEMARENQTTARGKKNSQQRYKRIEDALKNLAPGLDSNILKENPTDNIQLKNDRLFLYYLQNGKDMYTGKPLDINQLSSYDIDHIIPQAFIKDDSIDNRVLTSSKDNRGKSDNVPSLEVVQKRKAFWQQLLDSKLISERKFNNLTKAERGGLDERDKVGFIRRQLVETQQITKNVAQILDARFNTEVKEKNQKIRTVKIITLKSNLVSNFRKEFGLYKVREINNYHHAHDAYLNAVVAKAILKKYPKLEPEFVYGDYQKYDLKKYISRFKPSKEIEKATEKYFFYSNLLNFFKEEVLYADGTIRKRENIEYSKDTGEIAWDKEKDFATIKKVLSYPQVNIVKKREVQTGGFSKESILPKGNSDKLIPRKTKDILWDTTKYGGFDSPVIAYSILLIADIEKGKAKKLKTVKTLVGITIMEKAAFEENPITFLENKGYHNVRKENILCLPKYSLFELENGRRRLLASAKELQKGNEIVLPVCLTTLLYHSKNLHKLDEPEHLEYIQKHRNEFKDLLNLVSEFSQKYILAEANLEKIKDLYADNEQADIEILANSFINLLTFTALGAPAAFKFFGKDVDRKRYTTVSEILNATLIHQSITGLYETRIDLSKLGEE

SEQ ID NO: 773 - protein, 1421 aa, Streptococcus sanguinis
MTKFNKNYSIGLDIGVSSVGYAVVTEDYRVPAFKFKVLGNTEKEKIKKNLIGSTTFVSAQPAKGTRVFRVNRRRIDRRNHRITYLRDIFQKEIEKVDKNFYRRLDESFRVLGDKSEDLQIKQPFFGDKELETAYHKKYPTIYHLRKHLADADKNSPVADIREVYMAISHILKYRGHFLTLDKINPNNINMQNSWIDFIESCQEVFDLEISDESKNIADIFKSSENRQEKVKKILPYFQQELLKKDKSIFKQLLQLLFGLKTKFKDCFELEEEPDLNFSKENYDENLENFLGSLEEDFSDVFAKLKVLRDTILLSGMLTYTGATHARFSATMVERYEEHRKDLQRFKFFIKQNLSEQDYLDIFGRKTQNGFDVDKETKGYVGYITNKMVLTNPQKQKTIQQNFYDYISGKITGIEGAEYFLNKISDGTFLRKLRTSDNGAIPNQIHAYELEKIIERQGKDYPFLLENKDKLLSILTFKIPYYVGPLAKGSNSRFAWIKRATSSDILDDNDEDTRNGKIRPWNYQKLINMDETRDAFITNLIGNDIILLNEKVLPKRSLIYEEVMLQNELTRVKYKDKYGKAHFFDSELRQNIINGLFKNNSKRVNAKSLIKYLSDNHKDLNAIEIVSGVEKGKSFNSTLKTYNDLKTIFSEELLDSEIYQKELEEIIKVITVFDDKKSIKNYLTKFFGHLEILDEEKINQLSKLRYSGWGRYSAKLLLDIRDEDTGFNLLQFLRNDEENRNLTKLISDNTLSFEPKIKDIQSKSTIEDDIFDEIKKLAGSPAIKRGILNSIKIVDELVQIIGYPPHNIVIEMARENMTTEEGQKKAKTRKTKLESALKNIENSLLENGKVPHSDEQLQSEKLYLYYLQNGKDMYTLDKTGSPAPLYLDQLDQYEVDHIIPYSFLPIDSIDNKVLTHRENNQQKLNNIPDKETVANMKPFWEKLYNAKLISQTKYQRLTTSERTPDGVLTESMKAGFIERQLVETRQIIKHVARILDNRFSDTKIITLKSQLITNFRNTFHIAKIRELNDYHHAHDAYLAVVVGQTLLKVYPKLAPELIYGHHAHFNRHEENKATLRKHLYSNIMRFFNNPDSKVSKDIWDCNRDLPIIKDVIYNSQINFVKRTMIKKGAFYNQNPVGKFNKQLAANNRYPLKTKALCLDTSIYGGYGPMNSALSIIIIAERFNEKKGKIETVKEFHDIFIIDYEKFNNNPFQFLNDTSENGFLKKNNINRVLGFYRIPKYSLMQKIDGTRMLFESKSNLHKATQFKLTKTQNELFFHMKRLLTKSNLMDLKSKSAIKESQNFILKHKEEFDNISNQLSAFSQKMLGNTTSLKNLIKGYNERKIKEIDIRDETIKYFYDNFIKMFSFVKSGAPKDINDFFDNKCTVARMRPKPDKKLLNATLIHQSITGLYETRIDLSKLGED

SEQ ID NO: 774 - protein, 317 aa, Streptococcus sp.
FEDSILFSYQVDSKFNRKISDATIYATRKAKLDKEKSEETYVLGKIKDIYSQAGYDAFIKIYNKDKSKFLMYHKDPQTFEKVIEEILRTYPSKELNDKNKEIPCNPFEKYRQENGPIRKYSKKSNGPEIKSLKYYDNKLGNHIDITPESSDNQVVLQSLKPWRTDVYFNHQTKKYELMGLKYSDLSFEKGSGKYSISNQKYNSIKRIEGIDEQSEFKFTLYKNDLILIKDSENNEQKLFRFNSRNDTAKHYIELKPYDKAKFDGEQELITILGNVAKGGRCLKGLNKSNISIFKVKTDVLGKKHIIKKEGDEPKLKF

SEQ ID NO: 775 - protein, 1420 aa, Streptococcus sp.
MAKFNKNYSIGLDIGVSSVGYAVVTEDYRVPAFKFKVLGNTEKEKIKKNLIGSTTFVPAQSAQGTRVFRVNRRRIDRRNHRIAYLRDIFQKEIEKIDKNFYRRLDESFRVLGDKSEDIQIKQPFFGNKELETAYHKKYPTIYHLRKHLADADKNSPVADIREVYMVLSHILKYRGHFLTLGKIDPNNINMQNSWIDFIESCQDAFDLEISDESKTIAAIFKSSENRQEKVKQILSYFQQELLKKDKSIFKQLLQLLFGLKTKFKDCFELEEEPDLNFSKENYDENLENLLGALEEDFSDVFAKLKILRDTILLSSMLTYTGATHARFSATMVERYEEHRKDLQRFKSFVKQNLSEQDYLDIFGRKTPTGFDVDKETKGYVGYISNKMVLTNPQKQKTIQQNFYDYISGKITGIEGAECFLNKISDGTFLRKLRTTDNGAIPNQIHAYELEKIIERQGRDYPFLLENKDKLLSILTFKIPYYVGPLAKGNNSRFAWIKRTTSQDVLDDNDEDTRNGKIRPWNYHKLINMDETRDAFIINLIGNDIILLNEKVLPKRSLIYEEVMLQNELTRVKYKDKYGKIHFFNSELRQEIINNLFKTNSKRVSSAMLLSYLENFTNLQAVEIVSGIEKGKSLNSTLKTYNDLKTIFSEELLDSEIYQKELEEIIKVITVFDDKKSIKNYLTKYFGHLEFLNEEKINQLSKLRYTGWGRYSGKLLLGIRDEDTGFNLMQFLRNDDENRNLTQLISDTTLSFDSAIKAIQSKSTVEDDVFEEIKNLAGSPAIKRGILNSIKIVDELVQIIGYPPQNIIIEMARENMTTEEGQKKAKTRKSKLESALKNIEDSVLESGKVPHSDEQLQSEKLYLYYLQNGKDMYSLDKTGSPTPLYRDQLDQYEVDHIIPYSFLPIDSIDNKVLTHRENNQRKLNNIPDKETVANMKPFWEKLYNAKLISQTKYQRLTTSERTPDGVLTESMKAGFIERQLVETRQIIKHVARILDNRFSDTKIITLKSQLVTNFRNTFHIAKIRELNDYHHAHDAYLAVVVGQTLLKAYPKLAPELIYGHHAHFNRHEENKATLRKHLYSNIMRFFNNPDSKVSKDIWDCNRDLPIVKDVIYNSQINFVKRTMIKKGAFYNQNPVGKLNKQIAANNRYPLKTKVSSLDTSIYGGYGPMNSALSIIIIAERFNEKKGKIETVKEFHDIFIIDYEKFNNNPFQFLNNVSEEGFLKKNDLNRVLAFYRISKYSLMQKIDGTRMLFESKSNLHKVTQFKLTKTQNELFFHMKRLLTKSNLMDLKSESAIKESQNFIQTHQNEFDNIADRLSNYSQKMLGETKSLQTLINGYNERPIKQIDNNEETIRYYYDNFIKMFSFVKSGAPKDIINFFNDKYTVPRMRPKPDRKMLDATLIHQSITGLYETRIDLSKLGED

SEQ ID NO: 776 - protein, 1371 aa, Streptococcus sp.
MENKNYSIGLDIGTNSVGWSVITDDYKVPSKKMKVLGNTDKHFIKKNLIGALLFDEGTTAEARRLKRTARRRYTRRKNRLRYLQEIFSEEIGKVDSSFFHRLDDSFLIPEDKRGSKYPIFATLAEEKKYHKQFPTIYHLRKQLADSKEKTDLRLIYLALAHMIKYRGHFLYEEAFDIKNNDIQKIFNEFISIYNNTFEGNSLSGQNVQVEAIFTDKISKSAKRERVLKLFPDEKSTGLFSEFLKLIVGNQADFKKHFDLEEKAPLQFSRDTYDEDLENLLGQIGDDFADLFLVAKKLYDAILLSGILTVTNPSTKAPLSASMIERYENHQKDLASLKQFIKNNLPEKYDEVFSDQSEDGYAGYIDGKTTQETFYKYIKNLLSKFEGADYFLDKIEREDFLRKQRTFDNGSIPHQIHLQEMNAILRRQGEHYPFLKENKEKIEKILTFRIPYYVGPLARGNRDFAWLTRNSDQAIRPWNFEEIVDKASSAEDFINKMTNYDLYLPEEKVLPKHSLLYETFAVYNELTKVKFIAEGLRDYQFLDSGQKKQIVTQLFKEKRKVTEKDIIQFLHNVDGYDGIELKGIEKQFNASLSTYHDLLKIIKDKAFMDDAKNEAILENIVHTLTIFEDREMIKQRLAQYDSLFDEKVIKALTRRHYTGWGKLSAKLINGISDKQTGNTILDYLIDDGEINRNFMQLINDDGLSFKEIIQKAQVVGKTNDVKQVVQELPGSPAIKKGILQSIKIVDELVKVMGHAPESIVIEMARENQTTARGKKNSQQRYKRIEDSLKILASGLNSKILKEHPTDNIQLQNDRLFLYYLQNGKDMYTGEALDINQLSSCDIDHIIPQAFIKDDSLDNRVLTSSKDNRGKSDNVPSLEVVDKMKVFWQQLLDSKLISYRKFNNLTKAERGGLNELDKVGFIKRQLVETRQITKHVAQILDARFNKEVTEKDKKNRTVKIITLKSNLVSNFRKEFELYKVREINDYHHAHDAYLNAVVAKAILKKYPKLEPEFVYGDYQKYDLKRYISRSKDPKEIEKATEKYFFYSNLLNFFKEEVHYADGTIVKRENIEYSKDTGEIAWNKEKDFATIKKVLSLPQVNIVKKREVQTGGFSKESILPKGNSDKLIPRKTKDILWDTTKYGGFDSPVIAYSILLIADIEKGKAKKLKTVKTLVGITIMEKDAFEKNPIAFLENKGYHNVCKENILCLPKYSLFELENGRRRLLASAKELQKCNEIVLPVYLTTLLYHSKNVHKLDEPGHLEYIQKHRNEFKDLLNLVSEFSQKYVLADANLEKIKNLYADNEQADIEILANSFINLLTFTALGAPAAFKFFGKDVDRKRYTTVSEILNATLIHQSITGLYETRIDLSKLGED

SEQ ID NO: 777 - protein, 93 aa, Streptococcus sp.
MILIKDSENNEQKLFRFNSRNDTAKHYVELKPYDKARFDGQQELITILGNVAKGGQCLKGLNKSNISIFKVKTDVLGKKHIIKKEGDEPKLKF

SEQ ID NO: 778 - protein, 1121 aa, Streptococcus sp.
MNGLVLGLDIGIASVGVGILEKNSGKIIHANSRLFPAATADNNVERRKNRQARRLHRRKKHRGVRFQDLFEDYGLLTDFSKVSINLNPYRLRVDGLNQQLTNEELFIALKNIVKRRGISYLDDASEDGGTVSSDYGKAVEENRKLLAEQTPGQIQLERFEKYGQVRGDFTVVENGEKRRLINVFSTSAYRKEAERILRKQQEFNSKITDEFIEDCLKILTGKRKYYHGPGNEKSRTDYGRFRTDGTTLDNIFGILIGKCTFYPDEYRASKASYTAQEFNLLNDLNNLTVPTETKKLSEEQKKVIVEYAKEAKTLGASTLLKYIAKMIDASVDQIRGYRVDVNNKPEIHTFEAYRKMQSLETISVGELSRNVLDELAHILTLNTEREGIEEAINTKLKDSFSQDQVLELVQFRKNNSSLFSKGWHNFSLKLMMELIPELYETSEEQMTILTRLGKQKSKEISKRTKYIDEKELTEEIYNPVVAKSVRQAIKIINEATKKHGIFDNIVIEMARENNEEDAKKDYIKRQKANQDEKNAAMEKAAFQYNGKKELPDSIFHGQKELATKIRLWHQQGEKCLYTGKNIPISDLIHNQYKYEIDHILPLSLSFDDSLSNKVLVLATANQEKGQRTPFQALDSMDDAWSYREFKSYVKESKLLGNKKKEYLLTEEDISKIEVKQKFIERNLIDTRYSSRVVLNALQDFYKAHKFDTTISVVRGQFTSQLRRKWGLEKSRETYHHHAVDALIIAASSQLRLWKKQNNPLIAYKEGQFVDSETGEIISLSDDEYKELVFKAPYDHFVDTLSSKTFEDSILFSYQVDSKFNRKISDATIYATRKAKLDKEKSEETYVLGKIKDIYSQAGYDAFIKIYNKDKSKFLMYHKDPQTFEKVIEEILRTYPSKELNDKNKEIPCNPFEKYRQENGPIRKYSKKSNGPEIKSLKYYDNKLGNHIDITPESSDNQVVLQSLKPWRTDVYFNHQTKKYELMGLKYSDLSFEKGSGKYSISNQKYNSIKRIEGIDEQSEFKFTLYKNDLILIKDSENNEQKLFRFNSRNDTAKHYIELKPYDKAKFDGEQELITILGNVAKGGRCLKGLNKSNISIFKVKTDVLGKKHIIKKEGDEPKLKF

SEQ ID NO: 779 - protein, 1026 aa, Streptococcus sp.
MNGLVLGLDIGIASVGVGILEKNSGKIIHANSRLFPAATADNNVERRKNRQARRLNRRKKHRGVRFQDLFEDYGLLTDFSKVSINLNPYRLRVDGLNQQLTNEELFIALKNIVKRRGISYLDDASEDGGAVSSDYGKAVEENRKLLAEQTPGQIQLERFEKYGQVRGDFTVVENGEKRRLINVFSTSAYRKEAEKILRKQQEFNNQITDEFIEDYLKILTGKRKYYHGPGNEKSRTDYGRFRTDGTTLDNIFGVLIGKCTFYPNEYRASKSSYTAQEFNLLNDLNNLTVPTETKKLSEEQKKVIVEYAKEAKTLGASTLLKYIVKMIDASVDQISGYRVDVNNKPEMHTFEVYRKMQSLETISVGELSRNVLDELAHILTLNTEREGIEEAINSKLMGVFSQDQVLELVQFRKNNSSLFSKGWHNFSLKLMMELIPELYETSEEQMTILTRLGKQKSKETSKRTKYIDEKELTEEIYNPVVAKSVRQAIKIINEATKKHGIFDNIVIEMARENNEEDAKKDYIKRQKANQDEKNAAMEKAAFQYNGKKELPGNIFNGHKELATKIRLWHQQGEKCLYTGKTIPISDLIHNQYKYEIDHILPLSLSFDDSLSNKVLVHATANQEKGQRTPFQALDSMDDAWSYREFKSYVKDLKSLSNKKKDYLLTEEDISKIEVKQKFIERNLVDTRYSSRVVLNALQDFYKSHQFDTTISVVRGQFTSQLRRKWGLEKSRETYHHHAVDALIIAASSQLRLWKKQNNPLITYKEGQFIDSQTGEIISLTDDEYKELVFKAPYDHFVDTLHSKTFEDGILFSYQVDSKYNRKISDATIYATRKAKLDKDKSEETYVLGKIKDIYSQAGYDAFIKIYNKDKRKFLMYHKDPQTFEKVIEEILRTYPSKERNDKNKEVPCNPFEKYRQENGPIRKYSKKGNGPEIKCLKYYDNKLGNYIDISPDGSDNQVVLQSLKPWRTDVYFNHQTKKYELMGLKYSDLSFEKGSGKYSISNEKYNSIKRIEGVNEQSEFKFTLYK

SEQ ID NO: 780 - protein, 1377 aa, Streptococcus sp.
MNNKPYSIGLDIGTNSVGWSVITDDYKVPSKKMKVLGNTDKRFIKKNLIGALLFDEGTTAEARRLKRTARRRYTRRKNRLRYLQEIFAEEMSKVDSSFFHRLDDSFLIPEDKRGSKYPIFATLVEEKEYHKQFPTIYHLRKQLADSKEKADLRLIYLVLAHMIKYRGHFLYEEAFDIKNNDIQKIFNEFISIYDNTFEGSSLSGQNAQVETIFTDKISKSAKRERVLKLFPDEKSTGLFSEFLKLIVGNQADFKKHFDLEEKAPLQFSKDTYDEDLENLLEQIGDDFADLFVAAKKLYDAILLSGILTVTDPSTKAPLSASMIERYENHQKDLAVLKQFIKTNLPEKYVEVFSDQSKDGYAGYIDGKTTQEAFYKYIKNLLSKFDGADYFLDKIEREVFLRKQRTFDNGSIPHQIHLQEMNTILRRQGEHYPFLKENKEKIEKILTFRIPYHVGPLARGNRDFAWLTRNSDQAIRPWNFEEIVDKASSAEDFINKMTNYDLYLPEEKVLPKHSLLYETFAVYNELTKVKFIAEGMRDYQFLDSGQKKKIINQLFKKKRKVTEDDIIDCLQKIDNYDGIELKGIEKQFNASLSTYHDILKIIRDKEFMDDPKNGDILENVIHTLTIFEDREMIKQRLAQYNSIFDEKVIKALSRKHYTGWGKLSAKLIDGIRDKQTGKTILDYLMDDGKSNRNFMQLIKDDELSFTEIIQKAQVVGDTDNLRQVVQNLPGSPAIKKGILQSIKIVDELVKVMGHAPESIVIEMARENQTTARGKKNSQQRYKRIEDSLKNLASGLDSNILKENPTDNIQLQNDRLFLYYLQNGKDMYTGEALNINQLSSYDIDHIIPQAFIKDDSLDNRVLTSSKDNRGKSDNVPSLEVVEKMKAFWQQLLDSKLISERKYNNLTKAERERGGLNELDKVGFIKRQLVETRQITKHVAQILDARFNKEVTEKNKKNRNVKIITLKSNMVSNFRKEFGLYKVREINDYHHAHDAYLNAVVAKAILKKYPKLEPEFVYGDYQKYDLKRYISRSKDPKEVEKATEKYFFYSNLLNFFKEEVHYADGTIVKRENIEYSKDTGEIAWNKEKDFATIKKVLSLPQVNIVKKTEEQTVGQNGGLFDNNIVSKKKVVDASKLIPIKSGLSPEKYGGYARPTIAYSVLVTYKQNNKIKNTMVGIPVLTKLEFERDPNLYLRNLGINNVSHVIKLVKYTVLEFKHKYGTYRRFIVSNQELKRANQIFVTTKQMKLISQYTTLDKNEHDSLLKNNQQLIQSIWNQFLEFMLATDLVNKKQYDELILTNNQTIEECRNIMNRVITTLSFTNINAGQKKIIFDDTLSLPIKRWQFTDSDKMVKKIIESTLIHQSITGLYETRIDLSKLGED

SEQ ID NO: 781 - protein, 1371 aa, Streptococcus sp.
MNNNNYSIGLDIGTNSVGWAVITDDYKVPSKKMRVLGNTDKRFIKKNLIGALLFDEGTTAEDRRLKRTARRRYTRRKNRLRYLQEIFAEEMSKVDSSFFHRLDDSFLVPEDKSGSKYPIFATLAEEKEYHKKFPTIYHLRKHLADSKEKADLRLIYLALAHITKYRGHFLYEEAFDIKNNDIQKIFNEFINIYDNTFEGSSLSGQNAQVEAIFTGKISKSVKREHVLKLFPDEKSTGLFSEFLKLIVGNQADFKKHFDLEEKASLQFSKDTYDEDLENLLGQIGDDFADLFLVAKKLYDAILLSGILTVTDPSTKAPLSASMIERYENHQEDLAALKQFIKNNLPEKYAEVFSDQSKDGYAGYIDGKTTQEAFYKYIKNLLSKFEGADYFLDKIEREDFLRKQRTFDNGSIPHQIHLQEMNAILRRQGEHYPLLKENKEKIEKILTFRIPYYVGPLARGNRDFAWLTRNSDQAIRPWNFEEIVDKASSAESFINKMTNYDLYLPEEKVLPKHSLLYETFAVYNELTKVKFIAEGLRDYQFFDSGQKKQIVNQLFKEKRKVTEKDIIHYLHNVDGYDGIELKGIEKQFNASLSTYHDLLKIIKDKEFMDNHKNQEILENIVHTLTIFEDREMIKQRLAQYDSIFDEKVIKALTRRHYTGWGKLSAKLINGICDKKTGKTILDYLIDDGYNNRNFMQLINDDGLSFKEIIQKAQVVGKTDDLTQVVRELSGSPAIKKGILQSIKIVDELVKIMGYAPESIVIEMARENQTTAKGKKNSQQRYKRIEDALKNLAPGLDSTISKENPTDNIQLQNDRLFLYYLQNGKDMYTGEALDINQLSSYDIDHIIPQAFIKDDSLDNRVLTSSKDNRGKSDNVPSLEVVKKRKAFWQQLLDSKLISERKFNNLTKAERGGLDERDKVGFIKRQLVETRQITKHVARILDARFNTEVSEKNQKIRSVKIITLKSNLVSNFRKEFKLYKVREINDYHHAHDAYLNAVVAKAILKKYPKLEPEFVYGDYQKYDLKRYISKSKDPKEVEKATEKYFFYSNLLNFFKEEVHYADGTIVKRENIEYSKDTGEIAWNKEKDFVTIKKVLSYPQVNIVKKREVQTGGFSKESILPKGNSDKLIPRKTKDILWDTTKYGGFDSPVIAYSILLIADIEKGKAKKLKTVKTLVGITIMEKAAFEKNPITFLENKGYHNVRKENILCLPKYSLFELENGRRRLLASAKELQKGNEIVLPVYLTTLLYHSKNVHKLDEPEHLEYIQKHRYEFKDLLNLVSEFSQKYVLAEANLEKIKSLYVDNEQADIEILANSFINLLTFTALGAPAAFKFFGKDVDRKRYTTVSEILNATLIHQSITGLYETRIDLSKLGED

SEQ ID NO: 782 - protein, 1139 aa, Streptococcus sp.
MSDLVLGLDIGIGSVGVGILNKVTGEIIHKNSRIFPAAQAENNLERRTNRQGRRLTRRKKHRRVRLNHLFEESGLITDFTKVSINLNPYQLRVKGLTAELSNEELFIALKNMVKHRGISYLDDASDDGNSSVGDYAQIVKENSKQLETKTPGQIQLERYQKYGQLRGDFTVEEDGRKHRLINVFPTSAYHAEALRILQTQQEFNPQITDEFINSYLEILTGKRKYYHGPGNEKSRTDYGKYTTKKDAQGQYITLNNIFGILIGKCTFYPEEYRAAKASYTAQEFNLLNDLNNLTVPTETKKLSEEQKYQIITYVKNEKAMGPAKLFKYIAKLLSCDVADIKGYRIDKSDKAEIHTFEAYRKMKTLETLDVKKMAREELDKLAYVLTLNTEREGIQEALDHEFADGTFSQEQVDELVQFRKANSSIFGKGWHSFSVKLMMELIPELYATSEEQMTILTRLGKQKTTSSSNKTKYIDEKQLTEEIYNPVVAKSVRQAIKIVNAAIKKYGDFDNIVIEMARETNEDDEKKAIQKIQKANKAEKDAAMRKAANQYNGKAELPHSVFHGHKQLATKIRLWHQQGERCLYTGKTISIHDLINNPNQFEIDHILPLSITFDDSLANKVLVYATANQEKGQRTPYQALDSMDDAWSFRELKAFVRESKALSNKKKEYLLTEEDISKFDVRKKFIERNLVDTRYASRVVLNALQEHFRTHKIDTKVSVVRGQFTSQLRRHWGIEKTRDTYHHHAVDALIIAASSQLNLWKKQKNTLVSYSEDQLLDIETGELISDDEYKESVFKAPYQHFVDTLKSKEFEDSILFSYQVDSKFNRKISDATIYATRKAKLDKEKKEYTYTLGKIKDIYALGTKTPSKTGFYKFLDLYKKDKSQFLMYQKDRRTWDEVIEKILEQYRPFKEKDKNGKEVDFNPFEKYRIENGPIRKYSRKGNGPEIKSLKYYDNLLGRFVDITPSESKNPVALLSLNPWRTDVYYNTETRKYEFLGLKYADLCFEKGGSYGISKVKYNKIREKEGIGKNSEFKFTLYKNDLILIKDTETNRQQIFRFWSRTGKDNPKSFEKHKLELKPYEKTRFEKGEELKVLGKVPPSSNRLQKNMQIENLSIYKVRTDVLGNQHIIKNEGDKPKLDF

SEQ ID NO: 783 - protein, 1375 aa, Streptococcus sp.
MSNKSYSIGLDIGTNSVGWAVITDDYKVPSKKMKVLGNTDKHFIKKNLIGALLFDEGTTAEDRRLKRTARRRYTRRKNRLRYLQEIFSQEISKVDSSFFHRLDDFFLVPEDKRGSKYPIFATLVEEKEYHKKFPTIYHLRKHLADSKEKTDLRLIYLALAHMIKYRGHFLYEESFDIKNNDIQKIFSEFISIYDNTFEGKSLSGQNAQVEAIFTDKISKSTKRERVLKLFPDEKSTGLFSEFLKLIVGNQADFKKHFDLEEKAPLQFSKDTYDEDLENLLGQIGDDFADLFLVAKKLYDAILLSGILTVKDLSTKAPLSASMIERYENHQKDLAALKQFIQNNLQEKYDEVFSDQSKDGYAGYIDGKTTQEAFYKYIKNLLSKFEGADYFLDKIEREDFLKKQRTFDNGSIPHQIHLQEMNAIIRRQGEHYPFLQENKEKIEKILTFRIPYYVGPLARGNGDFAWLTRNSDQAIRPWNFEEIVDQASSAEDFINKMTNYDLYLPEEKVLPKHSLLYETFAVYNELTKVKFIAEGLTRYQFLDKKQKKDIFDTFFKAENKRKVTEKDIIHYLHNVDGYDGIELKGIEKQFNASLSTYHDLLKIIKDKAFMDDSKNEEILENIIHTLTIFEDREMIKQRLAQYDSLFDEKVIKALTRRHYTGWGKLSAKLINGIRDKKSGKTILDYLIDDGEINRNFMQLIHDDGLSFKEIIQKAQVFGKTNDVKQVVQELPGSPAIKKGILQSIKIVDELVKVMGHAPESIVIEMARENQTTARGKKNSQQRYKRIEDSLKNLASGLDSNILKENPTDNIQLQNDRLFLYYLQNGRDMYTGKPLEINQLSNYDIDHIIPQAFIKDDSLDNRVLTSSKDNRGKSDNVPSLEVVEKMKAFWQQLLDSKLISERKFNNLTKAERERGGLNELDKVGFIKRQLVETRQITKHVAQFLDARFNKEVTEKDKKNRNVKIITLKSNLVSNFRKEFGLYKVREINDYHHAHDAYLNAVLAKAILKKYPKLEPEFVYGDYQKYDLQRYISKSREPKEVEKATQKYFFYSNLLNFFKEEVHYADGTIVKRENIEYSKDTGEIAWNKEKDFATVKKVLSLPQVNIVKKTEVQTGGFSKESILPKGNSDKLIPRKTKEILWDTTKYGGFDSPVIAYSILLIADIEKGKAKKLKTVKTLVGITIMEKATFEKNPITFLENKGYHNVRKENILCLPKYSLFELESGRRRMLASAKELQKGNEIVLPVYLTTLLYHSKNVHKLDEPEHLEYIQKHRYEFKDLLNLVSEFSQKYVLADANLEKIKNLYADNEQADIEILANSFINLLTFTALGAPAAFKFLGKDVDRKRYTTVSEILNATLIHQSITGLYETRIDLSKLGED

SEQ ID NO: 784 - protein, 206 aa, Streptococcus sp.
RTPFQALDSMDDAWSYREFKSYVKESKLLGNKKKEYLLTEEDISKIEVKQKFIERNLIDTRYSSRVVLNALQDFYKAHKFDTTISVVRGQFTSQLRRKWGLEKSRETYHHHAVDALIIAASSQLRLWKKQNNPLIAYKEGQFVDSETGEIISLSDDEYKELVFKAPYDHFVDTLSSKTFEDSILFSYQVDSKFNRKISDATIYATR

SEQ ID NO: 785 - protein, 1122 aa, Streptococcus suis
MSNGKILGLDIGIASVGVGVIDAQTGEIIHASSRIFPSANAANNAERRTFRGSRRLIRRKKHRIKRLDDLFNDFHINLDGEMSTDNPYVLRVKGLSQKLTVEELYISIKNIMKRRGISYLDDAESDNEAGRSDYAKAIERNRQLLTSKTPGEIQLERLEKYGQLRGNFTIIDEEGQSQQIINVFSTSDYVKEVEKILDCQKMYHKFISDEFCDKLIELLREKRKYYVGPGNEKSRTDYGIYRTDGTTLENLFGILIGKCTFYPDQYRSSRASYTAQEFNFLNDLNNLTVPTETKKLSQEQKEFLVNYAKETSVLGAGKILQQIAKLADCKVEDIRGYRLDNKDKPELHTFETYRAMKGLVPLVDIGVLSREQLDILADILTLNTDFEGIREALKKQLPNVFDEKQVKGLASFRKSKSQLFAKGWHNLSQKIMLEVIPELYATSDEQMTILTRLGKFEKSSVAEYPSSINVDEITDEIYNPVVAKSIRQTIKIINASIKKWDEFDQIVIEMPRDRNEDEEKKRIADGQKANAKEKADSILRAAELYCAGKVLPDYVYNGHNQLATKIRLWYQQGERCIYTGQPISIHDLIHNQNQYEIDHILPLSLTFDDSLSNKVLVLATANQEKAQRTPYNYLKSATSAWSYREFKDYVTKRKGIGKKKCEYLTFEEDINGFEVRSKFIQRNLVDTRYASKVILNALQDYFKISGIQTKVSVVRGQFTSQLRHKWGIEKTRETYHHHAVDALIIAASSQLRLWKKQESPLVVDYQEGRQVDLETGEILELTDEQYKELVYQPPYQGFVNTISSSAFDNEILFSYQVDSKVNRKISDATIYATRNAQLGKDKTEGIYVLGKIKDIYTQAGYEAFLKRYTKDKTSFLMYHKDLDTWEKVIEIILRDYREYDEKGKEIGNPFERYRRENGYVKKYSRKGNGTAIKSLKYYDNKLGNHIDITPENSRNAVVLQSLKPWRTDVYFNKETGKYEFLGIKYSDLSFEKGTGEYGISQEKYDSIKIAEGVAKKSIFKFTLYKQDLLFIKDIENNFGKLLRFTSKNDTSKHYVELKPYDKNKFGTEEPLLPVLGNVAKSGQCIKGLNKSNISIYKVRTDILGYRHFIKQEGEHPQLKFKK

SEQ ID NO: 786 - protein, 1381 aa, Streptococcus suis
MVKKKYAIGIDIGTNSVGWSIVTDDYKVPSKKMKVFGNTEKRYIKKNLLGTLLFDEGNTAENRRLKRTARRRYTRRRNRILYLQEIFAEEINKIDDSFFQRLDDSFLIVEDKQGSKHPIFGTLQEEKEYHKQFPTIYHLRKQLADSSQKADIRLIYLALAHIIKYRGHFLFEGDLKSENKDVQHLFNDFVEMFDKTVEGSYLSENLPNVADVLVEKVSKSRRLENILHYFPNEKKNGLFGNFLALALGLQPNFKTNFELAEDAKIQFSKETYEEDLEELLGKIGDDYADLFIATKSLYDGILLAGILSTTDSTTKAPLSSSMVNRYEEHQKDLALLKNFIHQNLSDSYKEVFNDKLKDGYAGYIEGKTTQENFYRFIKKAIEKIEGSNYFIDKIDREDFLRKQRTFDNGSIPHQIHLQEMHAIIRRQAEFYPFLVENQDKIEKILTFRIPYYVGPLARGKSEFAWLNRKSDEKIRPWNFDEMVDKETSAENFITRMTNYDRYLPDQKVLPKHSLLYEKFAVYNELTKVKFIAEGMRDYQFLDSGQKKDIVKTLFKTKRKVTAKDIKAYLENSNGYAGVELKGLEEQFNASLPTYHDLLKILRDKAFIDAEENQEILEDIVLTLTLFEDREMIRKRLEKYKDILTEEQRKKLERRHYTGWGRLSAKLINGILDKVTRKTILGYLIDDGTSNRNFMQLINDDTLSFVDEIRLAQGSGEAEDYRAEVQNLAGSPAIKKGILQSLKIVDELIEVMGYEPEHIVVEMARENQFTNQGRRNSQQRINRLENALKDFGSKILEEQKPYGVSKVNNIHLQSDRLFLYYLQNGKDMYTDEELDIDHLSEYDIDHIIPQAFIKDDSLDNKVLTKSAKNRGKSDDVPSMEIVHNRKNFWRQLLKSKLISQRKFDNLTKAERGGLTNEDKARFIQRQLVETRQITKHVARMLDTRFNTKLDEAGNRIRDPKVNIITLKSNLVSQFRKDYQLYKIREINNYHHAHDAYINAVVATALLKKYPQLAPEFVYGEYPTYNSYNSRKSATEKVLFYSNIMNFFKRIVVHSKTGEVRIRPVIEVNKETGEIVWDKKSDFRTVRKVLSYPQVNVVKKTEVQNHGLDRGKPKGFYNANLSPRPKEGSVENLVPAKQSFDTKRYGGYAGISNSYAVLVNGIIEKGKKKSKAEVTEFQGISILARKDFDKNPKQYLLNLGYKDIKSIIKLPKYSLFELENGSRRMLASILSTNNKRGEIHKGNEMYLPDKFVTLLYHAMRVNRTLEPGHKKYVETHRHVFDELLIYILEYNEKIVGAKANGKRIVEAYSARKDTDNLEELCNSFINLLNLTALGSAVDFEFLGTKIPRYRDYTPSSLLKATLIHQSVTGLYETRIDLSKLGGD

SEQ ID NO: 787 - protein, 39 aa, Streptococcus thermophilus
GRCIKGLGKSNISIYKVRTDVLGNQHIIKNEGDKPKLDF

SEQ ID NO: 788 - protein, 302 aa, Streptococcus thermophilus
MIRRKKHRIVRLNRLFEESGLITDFTKISINLNPYQLRVKGLTDELSNEELFIALKNMVKHRGISYLDDASDDGNSSVGDYAQIVKENSKQLETKTPGQIQLERYQTYGQLRGDFTVEKDGKKHRLINVFPTSAYRSEALRILQTQQEFNPQITDEFINRYLEILTGKRKYYHGPGNEKSRTDYGRYRTSGETLDNIFGILIGKCTFYPDEFRAAKASYTAQEFNLLNDLNNLTVPTETKKLSKEQKNQIINYVKNEKAMGPAKLFKYIAKLLSCDVADIKGYRIDKSGKAERFILSKPIEK

SEQ ID NO: 789 - protein, 1121 aa, Streptococcus thermophilus
MSDLVLGLDIGIGSVGVGILNKVTGEIIHKNSRIFPAAQAENNLVRRTNRQGRRLTRRKKHRIVRLNRLFEESGLITDFTKISINLNPYQLRVKGLTDELSNEELFIALKNMVKHRGISYLDDASDDGNSSVGDYAQIVKENSKQLETKTPGQIQLERYQTYGQLRGDFTVEKDGKKHRLINVFPTSAYRSEALRILQTQQEFNPQITDEFINRYLEILTGKRKYYHGPGNEKSRTDYGRYRTSGETLDNIFGILIGKCTFYPDEFRAAKASYTAQEFNLLNDLNNLTVPTETKKLSKEQKNQIINYVKNEKAMGPAKLFKYIAKLLSCDVADIKGYRIDKSGKAEIHTFEAYRKMKTLETLDIEQMDRETLDKLAYVLTLNTEREGIQEALEHEFADGSFSQKQVDELVQFRKANSSIFGKGWHNFSVKLMMELIPELYETSEEQMTILTRLGKQKTTSSSNKTKYIDEKLLTEEIYNPVVAKSVRQAIKIVNAAIKEYGDFDNIVIEMARETNEDDEKKAIQKIQKANKDEKDAAMLKAANQYNGKAELPHSVFHGHKQLATKIRLWHQQGERCLYTGKTISIHDLINNSNQFEVDHILPLSITFDDSLANKVLVYATANQEKGQRTPYQALDSMDDAWSFRELKAFVRESKTLSNKKKEYLLTEEDISKFDVRKKFIERNLVDTRYASRVVLNALQEHFRAHKIDTKVSVVRGQFTSQLRRHWGIEKTRDTYHHHAVDALIIAASSQLNLWKKQKNTLVSYSEDQLLDIETGELISDDEYKESVFKAPYQHFVDTLKSKEFEDSILFSYQVDSKFNRKISDATIYATRQAKVGKDKADETYVLGKIKDIYTQDGYDAFMKIYKKDKSKFLMYRHDPQTFEKVIEPILENYPNKQMNEKGKEVPCNPFLKYKEEHGYIRKYSKKGNGPEIKSLKYYDSKLGNHIDITPKDSNNKVVLQSVSPWRADIYFNNTTGKYEILGLKYADLQFEKGTGTYKISQEKYNDIKKKEGVDSDSEFKFTLYKNDLLLVKETETKEQQLFRFLSRTMPKQKHYVELKPYDKQKFEGGEALIKVLGNVANGGQCIKGLGKSNISIYKVRTDVLGNQHIIKNEGDKPKLDF

SEQ ID NO: 790 - protein, 1121 aa, Streptococcus thermophilus
MSDLVLGLDIGIGSVGVGILNKVTGEIIHKNSRIFPAAQAENNLVRRTNRQGRRLTRRKKHRIVRLNRLFEESGLITDFTKISINLNPYQLRVKGLTDELSNEELFIALKNMVKHRGISYLDDASDDGNSSVGDYAQIVKENSKQLETKTPGQIQLERYQTYGQLRGDFTVEKDGKKHRLINVFPTSAYRSEALRILQTQQEFNPQITDEFINRYLEILTGKRKYYHGPGNEKSRTDYGRYRTSGETLDNIFGILIGKCTFYPDEFRAAKASYTAQEFNLLNDLNNLTVPTETKKLSKEQKNQIINYVKNEKAMGPAKLFKYIAKLLSCDVADIKEYRIDKSGKAEIHTFEAYRKMKTLETLDIEQMDRETLDKLAYVLTLNTEREGIQEALEHEFADGSFSQKQVDELVQFRKANSSIFGKGWHNFSVKLMMELIPELYETSEEQMTILTRLGKQKTTSSSNKTKYIDEKLLTEEIYNPVVAKSVRQAIKIVNAAIKEYGDFDNIVIEMARETNEDDEKKAIQKIQKANKDEKDAAMLKAANQYNGKAELPHSVFHGHKQLATKIRLWHQQGERCLYTGKTISIHDLINNSNQFEVDHILPLSITFDDSLANKVLVYATANQEKGQRTPYQALDSMDDAWSFRELKAFVRESKTLSNKKKEYLLTEEDISKFDVRKKFIERNLVDTRYASRVVLNALQEHFRAHKIDTKVSVVRGQFTSQLRRHWGIEKTRDTYHHHAVDALIIAASIQLNLWKKQKNTLVSYSEDQLLDIETGELISDDEYKESVFKAPYQHFVDTLKSKEFEDSILFSYQVDSKFNRKISDATIYATRQAKVGKDKADETYVLGKIKDIYTQDGYDAFMKIYKKDKSKFLMYRHDPQTFEKVIEPILENYPNKQINEKGKEVPVNPFLKYKEEHGYIRKYSKKGNGPEIKSLKYYDSKLGNHIDITPKDSNNKVVLQSVSPWRADVYFNKTTGKYEILGLKYADLQFEKGTGTYKISQEKYNDIKKKEGVDSDSEFKFTLYKNDLLLVKDTETKEQQLFRFLSRTMPKQKHYVELKPYDKQKFEGGEALIKVLGNVANSGQCKKGLGKSNISIYKVRTDVLGNQHIIKNEGDKPKLDF

SEQ ID NO: 791 - protein, 1121 aa, Streptococcus thermophilus
MSDLVLGLDIGIGSVGVGILNKVTGEIIHKNSRIFPAAQAENNLVRRTNRQGRRLTRRKKHRRVRLNRLFEESGLITDFTKISINLNPYQLRVKGLTDELSNEELFIALKNMVKHRGISYLDDASDDGNSSVGDYAQIVKENSKQLETKTPGQIQLERYQTYGQLRGDFTVEKDGKKHRLINVFPTSAYRSEALRILQTQQEFNPQITDEFVNRYLEILTGKRKYYHGPGNEKSRTDYGRYRTNGETLDNIFGILIGKCTFYPEEFRAAKASYTAQEFNLLNDLNNLTVPTETKKLSKEQKNQIINYVKNEKAMGPAKLFKYIAKLLSCDVADIKGYRIDKSGKAEIHTFEAYRKMKTLETLDIEQMDRETLDKLAYVLTLNTEREGIQEALEHEFADGSFSQKQVDELVQFRKANSSIFGKGWHNFSVKLMMELIPELYETSEEQMTILKRLGKQKTTSSSNKTKYIDEKLLTEEIYNPVVAKSIRQAIKIVNAAIKEYGDFDNIVIEMARETNEDDEKKAIQKIQKANKDEKDAAMLKAANQYNGKAELPHSVFHGHKQLATKIRLWHQQGERCLYTGKTISIHDLINNPNQFEVDHILPLSITFDDSLANKVLVYATANQEKGQRTPYQALDSMDDAWSFRELKAFVRESKTLSNKKKEYLLTEEDISKFDVRKKFIERNLVDTRYASRVVLNALQEHFRAHKIDTKVSVVRGQFTSQLRRHWGIEKTRDTYHHHAVDALIIAASSQLNLWKKQKNTLVSYSEDQLLDIETGELISDDEYKESVFKAPYQHFVDTLKSKEFEDSILFSYQVDSKFNRKISDATIYATRQAKVGKDKKDETYVLGKIKDIYTQDGYDAFMKIYKKDKSKFLMYRHDPQTFEKVIEPILENYPNKEMNEKGKEVPCNPFLKYKEEHGYIRKYSKKGNDPEIKSLKYYDSKLGNHIDITPKDSNNKVVLQSVSPWRADVYFNKTTGKYEILGLKYADLQFEKGTGTYKISQEKYNDIKKKEGVDSDSEFKFTLYKNDLLLVKDTETKEQQLFRFLSRTMPKQKHYVELKPYDKQKFEGGEALIKVLGNVANSGQCKKGLGKSNISIYKVRTDVLGNQHIIKNEGDKPKLDF

SEQ ID NO: 792 - protein, 1122 aa, Streptococcus thermophilus
MSDLVLGLDIGIGSVGVGILNKVTGEIIHKNSRIFPAAQAENNVERRTNRQGRRLTRRKKHRRVRLNRLFEESGLITDFTKISINLNPYQLRVRGLTDELSNEELFIALKNMVKHRGISYLDDASDDGNSSVGDYAQIVKENSKQLETKTPGQIQLERYQTYGQLRGDFTVEKDGKKHRLINVFPTSAYRSEALRILQTQQEFNSQITDEFINRYLEILTGKRKYYHGPGNEKSRTDYGRYRTSGETLDNIFGILIGKCTFYPEEFRAAKASYTAQEFNLLNDLNNLTVPTETKKLSKEQKNQIINYVKNEKAMGPAKLFKYIAKLLSCDVADIKGYRIDKSGKAEIHTFEAYRKMKTLETLDIEQMDRETLDKLAYVLTLNTEREGIQEALEHEFADGSFSQKQVDELVQFRKASSSIFGKGWHNFSVKLMMELIPELYETSEEQMTILTRLGKQKTTSSSNKTKYIDEKLLTEEIYNPVVAKSVRQAIKIVNAAIKEYGDFDNIVIEMARETNEDDEKKAIQKIQKANKDEKDAAMLKAANQYNGKAELPHSVFHGHKQLATKIRLWHQQGERCLYTGKTISIHDLINNPNQFEVDHILPLSITFDDSLANKVLVYATANQEKGQRTPYQALDSMDDAWSFRELKAFVRESKTLSNKKKEYLLTEEDISKFDVRKKFIERNLVDTRYASRVVLNALQEHFRAHKIDTKVSVVRGQFTSQLRRHWGIEKTRDTYHHHAVDALIIAASSQLNLWKKQKNTLVSYSEDQLLDIETGELISDDEYKESVFKAPYQHFVDTLKSKEFEDSILFSYQVDSKFNRKLSDATIYATRQAKVGKDKKDETYVLGKIKDIYTQDGYDAFMKIYKKDKSKFLMYRHDPQTFEKVIEPILENYPNKEMNEKGKEVPCNPFLKYKEEHGYIRKYSKKGNGPEIKSLKYYDSKLLGNPIDITPENSKNKVVLQSLKPWRADVYFNKTTGKYEILGLKYADLQFEKKTGTYKISQEKYNGIMKEEGVDSDSEFKFTLYKNDLLLVKDTETKEQQLFRFLSRTMPNVKYYVELKPYSKDKFEKNESLIEILGSADKSGRCIKGLGKSNISIYKVRTDVLGNQHIIKNEGDKPKLDF

SEQ ID NO: 793 - protein, 1388 aa, Streptococcus thermophilus
MTKPYSIGLDIGTNSVGWAVITDNYKVPSKKMKVLGNTSKKYIKKNLLGVLLFDSGITAEGRRLKRTARRRYTRRRNRILYLQEIFSTEMATLDDAFFQRLDDSFLVPDDKRDSKYPIFGNLVEEKAYHDEFPTIYHLRKYLADSTKKADLRLVYLALAHMIKYRGHFLIEGEFNSKNNDIQKNFQDFLDTYNAIFESDLSLENSKQLEEIVKDKISKLEKKDRILKLFPGEKNSGIFSEFLKLIVGNQADFRKCFNLDEKASLHFSKESYDEDLETLLGYIGDDYSDVFLKAKKLYDAILLSGFLTVTDNETEAPLSSAMIKRYNEHKEDLALLKEYIRNISLKTYNEVFKDDTKNGYAGYIDGKTNQEDFYVYLKNLLAEFEGADYFLEKIDREDFLRKQRTFDNGSIPYQIHLQEMRAILDKQAKFYPFLAKNKERIEKILTFRIPYYVGPLARGNSDFAWSIRKRNEKITPWNFEDVIDKESSAEAFINRMTSFDLYLPEEKVLPKHSLLYETFNVYNELTKVRFIAESMRDYQFLDSKQKKDIVRLYFKDKRKVTDKDIIEYLHAIYGYDGIELKGIEKQFNSSLSTYHDLLNIINDKEFLDDSSNEAIIEEIIHTLTIFEDREMIKQRLSKFENIFDKSVLKKLSRRHYTGWGKLSAKLINGIRDEKSGNTILDYLIDDGISNRNFMQLIHDDALSFKKKIQKAQIIGDEDKGNIKEVVKSLPGSPAIKKGILQSIKIVDELVKVMGGRKPESIVVEMARENQYTNQGKSNSQQRLKRLEKSLKELGSKILKENIPAKLSKIDNNALQNDRLYLYYLQNGKDMYTGDDLDIDRLSNYDIDHIIPQAFLKDNSIDNKVLVSSASNRGKSDDFPSLEVVKKRKTFWYQLLKSKLISQRKFDNLTKAERGGLLPEDKAGFIQRQLVETRQITKHVARLLDEKFNNKKDENNRAVRTVKIITLKSTLVSQFRKDFELYKVCEINDFHHAHDAYLNAVIASALLKKYPKLEPEFVYGDYPKYNSFRERKSATEKVYFYSNIMNIFKKSISLADGRVIERPLIEVNEETGESVWNKESDLATVRRVLSYPQVNVVKKVEEQNHGLDRGKPKGLFNANLSSKPKPNSNENLVGAKEYLDPKKYGGYAGISNSFAVLVKGTIEKGAKKKITNVLEFQGISILDRINYRKDKLNFLLEKGYKDIELIIELPKYSLFELSDGSRRMLASILSTNNKRGEIHKGNQIFLSQKFVKLLYHAKRISNTINENHRKYVENHKKEFEELFYYILEFNENYVGAKKNGKLLNSAFQSWQNHSIDELCSSFIGPTGSERKGLFELTSRGSAADFEFLGVKIPRYRDYTPSSLLKDATLIHQSVTGLYETRIDLAKLGEG

SEQ ID NO: 794 - protein, 1388 aa, Streptococcus thermophilus
MTKPYSIGLDIGTNSVGWAVITDNYKVPSKKMKVLGNTSKKYIKKNLLGVLLFDSGITAEGRRLKRTARRRYTRRRNRILYLQEIFSTEMATLDDAFFQRLDDSFLVPDDKRDSKYPIFGNLVEEKAYHDEFPTIYHLRKYLADSTKKADLRLVYLALAHMIKYRGHFLIEGEFNSKNNDIQKNFQDFLDTYNAIFESDLSLENSKQLEEIVKDKISKLEKKDRILKLFPGEKNSGIFSEFLKLIVGNQADFRKCFNLDEKASLHFSKESYDEDLETLLGYIGDDYSDVFLKAKKLYDAILLSGFLTVTDNETEAPLSSAMIKRYNEHKEDLALLKEYIRNISLKTYNEVFKDDTKNGYAGYIDGKTNQEDFYVYLKNLLAEFEGADYFLEKIDREDFLRKQRTFDNGSIPYQIHLQEMRAILDKQAKFYPFLAKNKERIEKILTFRIPYYVGPLARGNSDFAWSIRKRNEKITPWNFEDVIDKESSAEAFINRMTSFDLYLPEEKVLPKHSLLYETFNVYNELTKVRFIAESMRDYQFLDSKQKKDIVRLYFKDKRKVTDKDIIEYLHAIYGYDGIELKGIEKQFNSSLSTYHDLLNIINDKEFLDDSSNEAIIEEIIHTLTIFEDREMIKQRLSKFENIFDKSVLKKLSRRHYTGWGKLSAKLINGIRDEKSGNTILDYLIDDGISNRNFMQLIHDDALSFKKKIQKAQIIGDEDKGNIKEVVKSLPGSPAIKKGILQSIKIVDELVKVMGGRKPESIVVEMARENQYTNQGKSNSQQRLKRLEKSLKELGSKILKENIPAKLSKIDNNALQNDRLYLYYLQNGKDMYTGDDLDIDRLSNYDIDHIIPQAFLKDNSIDNKVLVSSASNRGKSDDFPSLEVVKKRKTFWYQLLKSKLISQRKFDNLTKAERGGLLPEDKAGFIQRQLVETRQITKHVARLLDEKFNNKKDENNRAVRTVKIITLKSTLVSQFRKDFELYKVREINDFHHAHDAYLNAVIASALLKKYPKLEPEFVYGDYPKYNSFRERKSATEKVYFYSNIMNIFKKSISLADGRVIERPLIEVNEETGESVWNKESDLATVRRVLSYPQVNVVKKVEEQNHGLDRGKPKGLFNANLSSKPKPNSNENLVGAKEYLDPKKYGGYAGISNSFAVLVKGTIEKGAKKKITNVLEFQGISILDRINYRKDKLNFLLEKGYKDIELIIELPKYSLFELSDGSRRMLASILSTNNKRGEIHKGNQIFLSQKFVKLLYHAKRISNTINENHRKYVENHKKEFEELFYYILEFNENYVGAKKNGKLLNSAFQSWQNHSIDELCSSFIGPTGSERKGLFELTSRGSAADFEFLGVKIPRYRDYTPSSLLKDATLIHQSVTGLYETRIDLAKLGEG

SEQ ID NO: 795 - protein, 595 aa, Streptococcus thermophilus
MVQFRKANSSIFGKGWHNFSVKLMMELIPELYETSEEQMTILKRLGKQKTTSSSNKTKYIDEKLLTEEIYNPVVAKSVRQAIKIVNAAIKEYGDFDNIVIEMARETNEDDEKKAIQKIQKANKDEKDAAMLKAANQYNGKAELPHSVFHGHKQLATKIRLWHQQGERCLYTGKTISIHDLINNPNQFEVDHILPLSITFDDSLANKVLVYATANQEKGQRTPYQALDSMDDAWSFRELKAFVRESKTLSNKKKEYLLTEEDISKFDVRKKFIERNLVDTRYASRVVLNALQEHFRAHKIDTKVSVVRGQFTSQLRRHWGIEKTRDTYHHHAVDALIIAASSQLNLWKKQKNTLVSYSEDQFLDIETGELISDDEYKESVFKAPYQHFVDTLKSKEFEDSILFSYQVDSKFNRKISDATIYATRKAKLDKEKKEYTYTLGKIKDIYTQAGYDAFIKIYKKDKSKFLMYHHDPQTFEKVIEPILENYPNKEINEKGKEVPCNPFLKYKEEHGYIRKYSKKGNGPEIKSFKYYDNLLGRHIDITPKNSKNIVALRKLNPWRTDVYFNHETMKYEFLGLKYADISYKKSKNKAGDFLPK

SEQ ID NO: 796 - protein, 1388 aa, Streptococcus thermophilus]
MTKPYSIGLDIGTNSVGWAVITDNYKVPSKKMKVLGNTSKKYIKKNLLGVLLFDSGITAEGRRLKRTARRRYTRRRNRILYLQEIFSTEMATLDDAFFQRLDDSFLVPDDKRDSKYPIFGNLVEEKVYHDEFPTIYHLRKYLADSTKKADLRLVYLALAHMIKYRGHFLIEGEFNSKNNDIQKNFQDFLDTYNAIFESDLSLENSKQLEEIVKDKISKLEKKDRILKLFPGEKNSGIFSEFLKLIVGNQADFRKCFNLDEKASLHFSKESYDEDLETLLGYIGDDYSDVFLKAKKLYDAILLSGFLTVTDNETEAPLSSAMIKRYNEHKEDLALLKEYIRNISLKTYNEVFKDDTKNGYAGYIDGKTNQEDFYVYLKNLLAEFEGADYFLEKIDREDFLRKQRTFDNGSIPYQIHLQEMRAILDKQAKFYPFLAKNKERIEKILTFRIPYYVGPLARGNSDFAWSIRKRNEKITPWNFEDVIDKESSAEAFINRMTSFDLYLPEEKVLPKHSLLYETFNVYNELTKVRFIAESMRDYQFLDSKQKKDIVRLYFKDKRKVTDKDIIEYLHAIYGYDGIELKGIEKQFNSSLSTYHDLLNIINDKEFLDDSSNEAIIEEIIHTLTIFEDREMIKQRLSKFENIFDKSVLKKLSRRHYTGWGKLSAKLINGIRDEKSGNTILDYLIDDGISNRNFMQLIHDDALSFKKKIQKAQIIGDEDKGNIKEVVKSLPGSPAIKKGILQSIKIVDELVKVMGGRKPESIVVEMARENQYTNQGKSNSQQRLKRLEKSLKELGSKILKENIPAKLSKIDNNALQNDRLYLYYLQNGKDMYTGDDLDIDRLSNYDIDHIIPQAFLKDNSIDNKVLVSSASNRGKSDDFPSLEVVKKRKTFWYQLLKSKLISQRKFDNLTKAERGGLLPEDKAGFIQRQLVETRQITKHVARLLDEKFNNKKDENNRAVRTVKIITLKSTLVSQFRKDFELYKVREINDFHHAHDAYLNAVIASALLKKYPKLEPEFVYGDYPKYNSFRERKSATEKVYFYSNIMNIFKKSISLADGRVIERPLIEVNEETGESVWNKESDLATVRRVLSYPQVNVVKKVEEQNHGLDRGKPKGLFNANLSSKPKPNSNENLVGAKEYLDPKKYGGYAGISNSFAVLVKGTIEKGAKKKITNVLEFQGISILDRINYRKDKLNFLLEKGYKDIELIIELPKYSLFELSDGSRRMLASILSTNNKRGEIHKGNQIFLSQKFVKLLYHAKRISNTINENHRKYVENHKKEFEELFYYILEFNENYVGAKKNGKLLNSAFQSWQNHSIDELCSSFIGPTGSERKGLFELTSRGSAADFEFLGVKIPRYRDYTPSSLLKDATLIHQSVTGLYETRIDLAKLGEG

SEQ ID NO: 797 - protein, 1038 aa, Streptococcus vestibularis
MIDELSNEELFIALKNMVKHRGISYLDDASDDGNSSVGDYAQIVKENSKQLETKTPGQIQLERYQKYGQLRGDFTVEEDGKKHRLINVFPTSAYRAEALRILQTQQEFNSQITDEFINRYLEILTGKRKYYHGPGNEKSRTDYGRYRTSGETLDNIFGILIGKCTFYPEEFRAAKASYTAQEFNLLNDLNNLTVPTETKKLSEEQKNQIINYVKNEKAMGPAKLFKYIAKLLSCDIADIKGYRIDKSDKAEIHTFEAYRKMKTLETIDIEKMSREELDKLAYVLTLNTEREGIQEALEHEFVDGNFSQEQIDELVQFRKANSSIFGKGWHNFSVKLMMELIPELYATSEEQMTILTRLGKQKTTSSSNKTKYIDEKLLTEEIYNPVVAKSVRQAIKIVNAAIKEYGDFDNIVIEMARATNEDDEKKAIQKIQKANKDEKDAAMLKAANQYNGKAELPHSVFHGHKQLATKIRLWHQQGERCLYTGKTISIHDLINNPNQFEIDHILPLSITFDDSLANKVLVYATANQEKGQRTPYQALDSMDDAWSFRELKAFVRESKTLSNKKKEYLLTEEDISKFDVRKKFIERNLVDTRYASRVVLNALQEHFRAHKIDTKVSVVRGQFTSQLRRHWGIEKTRDTYHHHAVDALIIAASSQLNLWKKQKNTLVNYSENQLLDIETGELISDDEYKESVFKAPYQHFVDTLKSKEFEDSILFSYQVDSKFNRKISDATIYATRKAKLDKEKKEYTYTLGKIKDIYALGTKTPSKTGFYKFLDLYKKNKSQFLMYQKDRKTWDEVIEKILEQYRPFKEKDKNGKEVDFNPFEKYRIENGPIRKYSRKGNGPEIKSLKYYDNLLGRFVDITPSESKNPVALLSLNPWRTDVYYNTETRKYEFLGLKYADLCFEKGGSYGISKVKYNKIREKEGIGKNSEFKFTLYKNDLILIKDTETNRQQVFRFWSRTGKDNPKRFEKHKIELKPYEKARFEKGEELEVLGKVPPSSNQLQKNMQIENLSIFKVRTDVLGNQHIIKNEGDKPKLDF

SEQ ID NO: 798 - protein, 97 aa, Streptococcus vestibularis
MSDLVLGLDIGIGSVGVGILNKVTGEIIHKNSRIFPAAQAENNVERRTNRQGRRLTRRKKHRRVRLNHLFEESGLITDFTKVSINLNPYQLRVKIDR

SEQ ID NO: 799 - protein, 1084 aa, Subdoligranulum sp.
MKNTLYGIGLDIGVASVGWAVVGLNGTGEPVGLHRLGVRIFDKAEQPKTGESLAAPRRMARGMRRRLRRKALRRADVYALLERSGLSTREELAQMFEAGGLEDIYALRTRALDEPVGKAEFSRILLHLAQRRGFKSNRRTASDGEDGRLLAAVNENRRRMAQGGWRTVGEMLYRHEAFALHKRNKADDYLSTVGRDMVAEEASILFERQRAMGCSWAAPELQAEYLSILLRQRSFDEGPGGNSPYGGNQVEKMVGRCTFEPDEPRAAKAAYSFEYFSLLQKLNHIRLAENGETRPLTQPQRQQLLSLAHKTPDISLARIRKELALPETVQFNGVRCRANETLEESEKKEKFACLPAYHKMRKALDGVVKGRISSLSISQRDAAATALSLYKNEDTLRAKLTEAGFQAPEIDALAGLTGFSKFGHLSLKACRKLIPHLEQGLTYDQACTAAGYDFKGHGAGERAFTLPAAAPEMEQITSPVVRRAVAQTIKVVNGIIREMDASPAWVRIELARELSKTFGERQEMDRSMRENAAQNERLMQELRDTFHLLSPTGQDLVKYRLWKEQDGVCAYSLRRLDVERLFEPGYVDVDHIVPYSLSFDDRRSNKVLVLSSENRQKGNRLPLQYLQGKRREDFIVWTNSSVHDYRKRQNLLREKLSGDEAEGFRQRNLQDTQHMARFLYNYISDHLAFAQSEALGKKRVFAVSGAVTSHLRKRWGLSKVRADGDLHHALDAAVVACTTDGMIRRISGYYGHIEGEYLQDADGAGSQHARTKERFPAPWPRFRDELIVRLSEQPAEPLLDINPEFYCEYGTEHIRPVFVSRMPRRKVTGPGHKETIKGAAAADEGLLTVRKALTELKLDKDGEIKDYYMPSSDTLLYEALKAQLRRFGGDGKKAFAEPFYKPKADGTPGPLVRKVKTTEKATLTVPVHGGAASNDTMVRVDVFLVPGDGYYWVPVYTADTLKPELPNRAVVQGKPYSEWKEMREEDFIFSLYPNDLVYVEHKSGLKFTLQNADSTLEKTRTQTSAFAYFVSGSISTASITIRTHDNAYGIPSLGVKTLKTFHKYQVDVLGNVFPVHKETRQKFR

SEQ ID NO: 800 - protein, 951 aa, Sutterella parvirubra
MPTVRPVFHSSASFDLGAKNTGLFLVNHPAGAAPSAEYAAAYTIVQPADGDGLNYSTTNRRAVRHRLRGGKRFKLARRLVLQVIDALRKLKPGLIRDEEMRRTVEALSSLLKRRGFTRIESEAQVDPTTLDSVDPAVFADHETLGGFFSLGIPISTQWDALSQNPGAVEQLFKALPSAKDFGKYVTEQFPEFAEQKKLYADAIKVLSSEAKSIVMQLGLGHHHRSKYFEMIAHDMLRDPRLQGVFELFGSEERFKTFICNVSNLQLRALRWYFDEPNPEVANQWNPEKFQVVWLRGLKYFHPDAERKADMKKLIDELTASKDILDALCTTDPRRTIPPYEDQNNRRPPFDQTLWLSAAELTRRYGDKWRIWSQKFERADRALSTGLDEILLYTDRRSRMFNRNQDPSVYADSYVLQRVLDRSSKLDRYALRALAAGYRTQELHEPLATLSDTLGTQHVETFLTFAAEYYEEVAAAKNGLWLDGPSRLLERADIHPPMKKKVLDLLLGNILDATPEIGRILRTVLWNRHVHEKSRSTPASLCRSIEAIRKDFGGEFRMRYDALDAKIRAAEDQKKKFKPTNAEEKDLFKAWNATKTMHAFLRDVLQLTPKQLERTASPYVFAQLHTLIDTERDGFTSTSLAAHLENHWRMRANAAGMAQCSRLPADAVRPFDGVLSKALDRQAFEAAKLAAQHLMSRKELTDTDIRYSIIIESNRFAFSASTAELKKNTLAKKNAEKGLNFELKRWQDKDSRIREASRGICAYTGAKLGDVVEYDHIIPRAFTTSAMGSVFNSEANLICVSRPGNQTKADKRYGLNKLHKTYLTAVFGTADVTTIAASIEDIVGKLASANRLRHFELLNEKEQDAVRHALFLDDESDARRIVLRELAAQNKSRVNGTQAWFVRAFMTKLLEITKDWRERTGNTLDIRSWKTDAEVASRLRSALNFHAEITLT

SEQ ID NO: 801 - protein, 406 aa, Sutterella parvirubra
SNLFREEVPYGDHFLPIIQMKNRIYIGYQLPKADGTGGNAVAVLGKDPLELLETLKPFLDREPQAFSDHPVTYKMINERAYELLTKCALTPDQTTELERTQAEVLRSLNYQTSRAAVLGRLVDDKNKFVAKDAVWKEKDFVISFKLSPKKSAFKASGQLELPAKSDWKALVDSPELAINWGQPADDTFSQRIERKVRMNSSHLEHTPKKRVVSLPVVDKPSGGFRIRRHNLDGSAVFQVHTVANNKYGGFSADSAGKVDWSTPVLCGHLQHANLVPLDPETASAEQLVRMSEWRVVETTSDIRLEVCPGTSGRRYVRVELPFTLLQEWLTAGKVADVPVSPLHLPGSIKLTDPKTFCAEAQKTLSIFAQPRATIFFEQLGDRVRFRFEASGGPATMNAAYNAAGRS

SEQ ID NO: 802 - protein, 389 aa, Sutterella wadsworthensis
MKACDLEEKTNHLQACVAIDLGARYTGTFSILHKSSHLPSKDDCRAATYVLPEDGGKMTYSQRNRTAVRHRIRGKKRFALARRMAMLIIREKLAAKSVTLTSSETRRLAEAVGSLLRRRGYNRLETETDNDLTVLENIEPEVFSEHEILGKYFYAGTDLAIQWETLSQDLSKISSLLAERLSEKDFKKYLTGLIPDDKNKIKHIISVFKMLIDEAESINMQCVLGHKHRTQYLSDIHADMHRDTRLSKAAEAFGGVDRLWRLLGNLSNLQLRAHRWYFNAPHLFDDQALEPARLQKTLVRAFKYLHCPQGVESRAQAELVKELEEADDIIDALCTIDPVRTIPPYENQQNRRPPFDQTLYLSPDLGVSGFLCLGRLFQGQPNEAALCFL

SEQ ID NO: 803 - protein, 976 aa, Tannerella sp.
MKKILGLDLGSNSIGWALVNEAENRDEASSIIKLGVRVNPLTVDEMQNFEKGKSITTNADRTLKRSMRRNLQRYKLRRDALIKLLKKVGFITDGTILSEQGNRTTFETYRLRAKAPDEEISLQELARVLLMINKKRGYKSSRKIKEKEAGTLIDGMEVAKKLYDEDLTPGQLCLQLLESGKKSLPDFYSSDLQEEFDRIWNFQKQFNPKAFCDTAKEEIKGKNKSQTWAILAKYFIWMEEMDVWNEKESKTERVEKECKLVGLKRTVKKEEQRKENYCWRVQALTEQLDLEKVAVVLQEINGQISTSSGYLGAISDRSKVLYFNRQTVGQYQMAELEKNPNTSLRNMVFYRQDYLDEFDKIWEKQAEFHKELTVELKKEIRDIIIFYQRRLKSQKGLIGFCEFENREIMVEKNGKMQAKVVGCKVIPRSHPLFQEFKIWQTLNNVEVFAGEKKCKRKRTDAFPGLFDGTEDTLMVEGWRYLYQEEKEILAKELSVKKSLKKEYILKLLFDNPQDLDMNFEQIEGNDTGNVLFSAYSKMIEKYGYEPLDFGKPTDKIIEQLQVIFADLGWNTDLLFVDLNKEGKDLEKQPYFKLWHLLYSFEGDNTPTGNGKLVEKLMELCHVGKECALELVNISFQNDYGSLSAKAIKKILPYLKEGNRYDVACGYAGYRHSKSSLTKEEIENKVLKDKLDILPKNSLRNPVVEKILNQMVNVINAIIDTYGKPDEIRVELARELKKSAKEREELTKAIAKSTREHEEIRKVLQEEFGMINVSRNDIIRYKLYKELKDNGYKTLYSNQDIPKEKVFSKEIDIEHIIPQARLFDDSLSNKTLEYKAINIEKGNKTAYDFVKEKYGEKGLQQYLNRCESLFKGHRTKLRKLKMGQENIPEGFIDRDLRNTQYIAKKALAMLNEICRRVVATTGSITDRLREDWQLVDVLKELRCFRYFKDTKMKANHNKNIFYTSIKVDVSDTSKILK

SEQ ID NO: 804 - protein, 1049 aa, Tistrella mobilis
MINERLTFGIDLGIGSCGWAVLRHADAAGEPGVIEGLGSWCFDVPETSKERIPTNQVRRSNRLLRRVIRRRRNRMAEIRRLFHAQGLLPSADEDALKRPRLDPWELRARGLDQCLSAEEFAVALGHIARHRGFRSSAKRKAANTSGEDSKMLSALLVTRERTARYRTVGEMFARDPEYSARRRNRDGIFDRTVARDDLIHEVGKLFEAQRARGSAFASPDLEADFNAIAFRQAEMQDSERLVGNCPFERDEKRAARWAPSFERFRLLTRLINLRIATAEGERRFTPEDLARVSAELGATAKLPVSRVRALIGLLPDERFTTIRVEDEDRDIVARTGEAAPGTWRLRKTLGEALWAEMQARPDQLDAIAHVLSFFEATAKIRSELDRLGLPAAVIEALDRGLEDGAFAKFKGAGHISAKACRNLLPHLQQGHRYDQACRLAGYDHAASTLSHTAQVVSKAGFNALVTELGESIANPIARKALTEGLKQIRAMCARWGLPGAIHIELAREVGNSIEKRRELESQRETTTKRRQTERDEIRGLLALEDVDDDTLLRYRLWKEQGGKCLYTGKDIHVRQLIATDNSVQVDHILPWSRFGDDSFNNKTLCLASANQRKRGQTPWEWFSLTGTPEAWEVFASRVETSKDLRGFKKRNLLLKNADEVAQRFRSRNLNDTRYAARLLAEAAKLFYPAGDRQEKDGRRRVLTRPGPLTAALRHAWGLESLKKADGKRVSDDRHHALDALAVAAISEREVQRLTRSFQEWEQQGLARPLRHVAPPWPGFRGDVLAAYAQAFVARPERRRARGKGHDASIRQVVGEGPEAQVFERRGLADLKEADLDRVKDPERNQAIIEAVRAWILAGRPADAPPRSPRGDVIVKLRTAPAKKIKPAVPVRGGTADRGDMVRIDVFTRPNRKGRDEWYLVPIYPHQVMNRKAWPHPPMRSVVAYKDEAGWTEIGAEHSFRFSLYPRSYVQLVKSNGDVIEGYLVSMDRSTGAFRVFVHNNPAEMAKGIGAKTLLNLRKFNVDRFGVRTEVKSEVRTWHGEVCTSPVPPD

SEQ ID NO: 805 - protein, 1395 aa, Treponema denticola
MKKEIKDYFLGLDVGTGSVGWAVTDTDYKLLKANRKDLWGMRCFETAETAEVRRLHRGARRRIERRKKRIKLLQELFSQEIAKIDEGFFQRMKESPFYAEDKTILQENALFNDKDFTDKTYHKAYPTINHLIKAWIENKVKPDPRLLYLACHNIIKKRGHFLFEGDFDSENQFDTSIQALFEYLREDMEVDIDADSQKVKEILKDSSLKNSEKQSRLNKILGLKPSDKQKKAITNLISGNKINFADLYDNPDLKDAEKNSISFSKDDFDALSDDLASILGDSFELLLKAKAVYNCSVLSKVIGDEQYLSFAKVKIYEKHKTDLTKLKAVIKKHFPNNYKKVFGYNQDNESKNNYSGYVGVCKTKNKKLVINNSVNQEDFYKFLKPILSAKSEIKEVNDILAEIETGNFLPKQISKSNAEIPYQLRKMELEKILSNAEKHFSFLKQKDEKGLSHSEKIIMLLTFKIPYYIGPINDNHKKSFPDRCWVVKKEKSPSGKTTPWNFFDHIDKEKTAEEFITSRTNFCTYLIGESVLPKNSLLYSEYTVLNEINNLQIIIDGKNICDTKLKQKIYEDLFKKYKKITQKQISTFIKHEGICNKTDEVIILGIDKECTSSLKSYIELKNIFGKQVDEISTKNMLEEIIRWATIYDEGEGKTILKTKIKAEYGKYCSDEQIKKILNLKFSGWGRLSRKFLETVTSEMPGFSEPVNIITAMRETQNNLMELLSSEFKFTENIKKINSGFEDAEKQFSYDGLVKPLFLSPSVKKMLWQTLKLVKEISHITQAPPKKIFIEMAKGAELEPARTKTRLKILQDLYSSCKNDADAFSSEIQYLSGKIENEDNLRLRSDKLYLYYTQLGKCMYCGKPIEIGHVFDTSNYDIDHIYPQSKIKDDSISNRVLVCSSCNKNKEDKYPLKSEIQSKQRGFWNFLQRNNFISLEKLNRLTRTTPISDDETAKFIARQLVETRQATKVAAKVLEKMFPETKIVYSKAETVSMFRNKFDIIKCREINDFHHAHDAYLNIVVGNVYNTKFTNNPWNFIKEKRDNPKIADTYNYYKVFDYDVKRNNITAWEKGKTIITVKDMLKRNTPIYTRQAACKKGGLFDQTIMKKGLGQHPLKKEGPFSNISKYGGYNKVSAAYYTLIEYEEKGNKIRSLETIPLYLVKDIQKDQDVLKSYLTDLLGKKEFKILVPKIKINSLLKINGFPCHITGKTNDSFLLRPAVQFCCSNDEVLYFKKIIRFSEIRSQREKIGKTISPYEDLSFRSYIKENLCKKTKNDEIGEKEFYDLLQKKNLEIYDMLLTKHKDTIYKKRPNSATIDILVKGKEKFKSLIIENQFEVILEILKLFSATRNVSELQHIGGSKYSGVAKIGNKISSLDNCILIYQSITGIFEKRIDLLKV

SEQ ID NO: 806 - protein, 769 aa, Treponema denticola
MKKEIKDYFLGLDVGTGSVGWAVTDTDYKLLKANRKDLWGMRCFETAETAEVRRLHRGARRRIERRKKRIKLLQELFSQEIAKIDEGFFQRMKESPFYAEDKTILQENALFNDKDFTDKTYHKAYPTINHLIKAWIENKVKPDPRLLYLACHNIIKKRGHFLFEGDFDSENQFDTSIQALFEYLREDMEVDIDADSQKVKEILKDSSLKNSEKQSRLNKILGLKPSDKQKKAITNLISGNKINFADLYDNPDLKDAEKNSISFSKDDFDALSDDLASILGDSFELLLKAKAVYNCSVLSKVIGDEQYLSFAKVKIYEKHKTDLTKLKAVIKKHFPNNYKKVFGYNQDNESKNNYSGYVGVCKTKNKKLVINNSVNQEDFYKFLKPILSAKSEIKEVNDILAEIETGNFLPKQISKSNAEIPYQLRKMELEKILSNAEKHFSFLKQKDEKGLSHSEKIIMLLTFKIPYYIGPINDNHKKSFPDRCWVVKKEKSPSGKTTPWNFFDHIDKEKTAEEFITSRTNFCTYLIGESVLPKNSLLYSEYTVLNEINNLQIIIDGKNICDTKLKQKIYEDLFKKYKKITQKQISTFIKHEGICNKTDEVIILGIDKECTSSLKSYIELKNIFGKQVDEISTKNMLEEIIRWATIYDEGEGKTILKTKIKAEYGKYCSDEQIKKILNLKFSGWGRLSRKFLETVTSEMPGFSEPVNIITAMRETQNNLMELLSSEFKFTENIKKINSGFEDAEKQFSYDGLVKPLFLSPSVKKCCGRL

SEQ ID NO: 807 - protein, 1395 aa, Treponema denticola
MKKEIKDYFLGLDVGTGSVGWAVTDTDYKLLKANRKDLWGMRCFETAETAEVRRLHRGARRRIERRKKRIKLLQELFSQEIAKIDEGFFQRMKESPFYAEDKTILQENALFNDKDFTDKTYHKAYPTINHLIKAWIENKVKPDPRLLYLACHNIIKKRGHFLFEGDFDSENQFDTSIQALFEYLREDMEVDIDADSQKVKEILKDSSLKNSEKQSRLNKILGLKPSDKQKKAITNLISGNKINFADLYDNPDLKDAEKNSISFSKDDFDALSDDLASILGDSFELLLKAKAVYNCSVLSKVIGDEQYLSFAKVKIYEKHKTDLTKLKAVIKKHFPNNYKKVFGYNQDNESKNNYSGYVGVCKTKNKKLVINNSVNQEDFYKFLKPILSAKSEIKEVNDILAEIETGNFLPKQISKSNAEIPYQLRKMELEKILSNAEKHFSFLKQKDEKGLSHSEKIIMLLTFKIPYYIGPINDNHKKSFPDRCWVVKKEKSPSGKTTPWNFFDHIDKEKTAEEFITSRTNFCTYLIGESVLPKNSLLYSEYTVLNEINNLQIIIDGKNICDTKLKQKIYEDLFKKYKKITQKQISTFIKHEGICNKTDEVIILGIDKECTSSLKSYIELKNIFGKQVDEISTKNMLEEIIRWATIYDEGEGKTILKTKIKAEYGKYCSDEQIKKILNLKFSGWGRLSRKFLETVTSEMPGFSEPVNIITAMRETQNNLMELLSSEFKFTENIKKINSGFEDAEKQFSYDGLVKPLFLSPSVKKMLWQTLKLVKEISHITQAPPKKIFIEMAKGAELEPARTKTRLKILQDLYSSCKNDADAFSSEIQYLSGKIENEDNLRLRSDKLYLYYTQLGKCMYCGKPIEIGHVFDTSNYDIDHIYPQSKIKDDSISNRVLVCSSCNKNKEDKYPLKSEIQSKQRGFWNFLQRNNFISLEKLNRLTRTTPISDDETAKFIARQLVETRQATKVAAKVLEKMFPETKIVYSKAETVSMFRNKFDIIKCREINDFHHAHDAYLNIVVGNVYNTKFTNNPWNFIKEKRDNPKIADTYNYYKVFDYDVKRNNITAWEKGKTIITVKDMLKRNTPIYTRQAACKKGELFNQTIMKKGLGQHPLKKEGPFSNISKYGGYNKVSAAYYTLIEYEEKVNKIRSLETIPLYLVKDIQKDQDVLKSYLTDLLGKKEIKILVPKIKINSLLKINGFPCHITGKTGDSFVLRPAVQFCCSNDEVLYFKKIIRFNEIRSQREKMGKTISPYEDLSFRSYIKENLCKKTKADEIGEKEFYDLLQKKNLEIYDMLLTKHKDTIYNKRPNSTTLGMLTKGRYEFINLKPKDQIIVMLEILKLFCTTREAIDLGLIKGKPAAGVATLGKKISNLDNCILIYQSITGIFEKRIDLLKV

SEQ ID NO: 808 - protein, 1395 aa, Treponema denticola
MKKEIKDYFLGLDVGTGSVGWAVTDTDYKLLKANRKDLWGMRCFETAETAEVRRLHRGARRRIERRKKRIKLLQELFSQEIAKIDEGFFQRMKESPFYAEDKTILQENTLFNDKDFTDKTYHKAYPTINHLIKAWIENKVKPDPRLLYLACHNIIKKRGHFLFEGDFDSENQFDTSIQALFEYLREDMEVDIDADSQKVKEILKDSSLKNSEKQSRLNKILGLKPSDKQKKAITNLISGNKINFADLYDNPDLKDAEKNSISFSKDDFDALSDDLASILGDSFELLLKAKAVYNCSVLSKVIGDEQYLSFAKVKIYEKHKTDLTKLKNVIKKHFPKDYKKVFGYNKNEKNNNNYSGYVGVCKTKSKKLIINNSVNQEDFYKFLKTILSAKSEIKEVNDILTEIETGTFLPKQISKSNAEIPYQLRKMELEKILSNAEKHFSFLKQKDEKGLSHSEKIIMLLTFKIPYYIGPINDNHKKSFPDRCWVIKKEKSPSGKTTPWNFFDHIDKDKTAEAFITSRTNFCTYLVGESVLPKSSLLYSEYTVLNEINNLQIIIDGKNICDIKLKQKIYEELFKKYKKITQKQISTFIKHEGICNKTDEVIILGIDKECTSSLKSYIELKNIFGKQVDEISTKNMLEEIIRWATIYDEGEGKTILKTKIKAEYGKYCSDEQIKKILNLKFSGWGRLSRKFLETVTSEMPGFSEPVNIITAMRETQNNLMELLSSEFKFTENIKKINSGFEDAEKQFSYNGLVKPLFLSPSVKKMLWQTLKLVKEISHITQAPPKKIFIEMAKGAELEPARTKTRLKILQDLYNNCKNDADAFSSEIKDLSGKIENEDNLRLRSDKLYLYYTQLGKCMYCGKPIEIGHVFDTSNYDIDHIYPQSKIKDDSISNRVLVCSSCNKNKEDKYPLKSEIQSKQRGFWNFLQRNNFISLEKLNRLTRTTPISDDETAKFIARQLVETRQATKVAAKVLEKMFPETKIVYSKAETVSMFRNKFDIIKCREINDFHHAHDAYLNIVVGNVYNTKFTNNPWNFIKEKRDNPKIADTYNYYKVFDYDVKRNNITAWEKGKTIITVKDMLKRNTPIYTRQAACKKGGLFDQTIMKKGLGQHPLKKEGAFSNISKYGGYNKVSAAYYTLIEYEEKGNKIRSLETIPLYLVKDIQKDQDVLKSYLTDLLGKKEIKILVPKIKINSLLKINGFPCHITGKTGDSFVLRPAVQFCCSNDEVLYFKKIIRFNEIRSQREKMGKTISPYEDLSFRSYIKENLCKKTKADEIGEKEFYDLLQKKNLEIYDMLLTKHKDTIYNKRPNSTTLGMLTKGRYEFINLKPKDQIIVMLEILKLFCTTREAIDLGLIKGKPAAGVATLGKKISNPDNCILIYQSITGIFEKRIDLLKV

SEQ ID NO: 809 - protein, 1395 aa, Treponema denticola
MKKEIKDYFLGLDVGTGSVGWAVTDTDYKLLKANRKDLWGMRCFETAETAEVRRLHRGARRRIERRKKRIKLLQELFSQEIAKIDEGFFQRMKESPLYAEDKTILQENTLFNDKDFTDKTYHKAYPTINHLIKAWIENKVKPDPRLLYLACHNIIKKRGHFLFEGDFDSENQFDTSIQALFEYLREDMELDIDADSQKVKEILKDSSLKNSEKQSRLNKMLGLKPSDKQKKAITNLISGNKINFADLYDNPDLKDAEKNSISFSKDDFDALSDDLASILGDSFELLLKAKAVYNCSVLSKVIGDEQYLSFAKVKIYEKHKTDLTKLKNVIKKHFPKDYKKVFGYNKNEKNNNNYSAYVGVCKITHKKLVIKNSASQEDFYKFLKTILSAKSEIKEVNDILTEIETGTFLPKQISKSNAEIPYQLRKMELEKILSNAEKHFSFLKQKDEKGLSHSEKIIMLLTFKIPYYIGPINDNHKKSFPDRCWVVKKEKSPSGKTTPWNFFDHIDKEKTAEEFITSRTNFCTYLIGESVLPKSSLLYSEYTVLNEINNLQIIIDGKNICDIKLKQKIYEELFKKYKKITQKQISTFIKHEGICNKTDEVIILGIDKECTSSLKSYIELKNIFGKQVDEISTKNMLEEIIRWATIYDEGEGKTILKTKIKAEYGKYCSDEQIKKILNLKFSGWGRLSRKFLETVTSEMPGFSEPVNIITAMRETQNNLMELLSSEFKFTENIKKINSGFEDAEKQFSYNGLVKPLFLSPSVKKMLWQTLKLVKEISHITQAPPKKIFIEMAKGAELEPARTKTRLKILQDLYSSCKNDADAFSSEIQYLSGKIENEDNLRLRSDKLYLYYTQLGKCMYCGKPIEIGHVFDTSNYDIDHIYPQSKIKDDSISNRVLVCSSCNKNKEDKYPLKAEIQSKQRGFWNFLQRNNFISLEKLNRLTRTSPISDDETAKFIARQLVETRQATKVAAKVLEKMFPETKIVYSKAETVSMFRNKFDIIKCREINDFHHAHDAYLNIVVGNVYNTKFTNNPWNFIKEKRDNPKIADTYNYYKVFDYDVKRNNITAWEKGKTIITVKDMLKRNTPIYTRQAACKKGELFNQTIMKKGLGQHPLKKEGPLSNISKYGGYNKVSAAYYTLIEYEEKGSKIRSLETIPLYLVKDIQKNKDGLKSYLTDQIGKKEIKILIPKIKINSLLKINGFPCHITGKMGEAFVLRPAVQFCCSNDEALYFKKIIRFNEIRKQREKMGKTISPYEDLSFRSYIKDNLCKKTKADEIEEKEFYDLLQKKNLEIYDMLLTKHKDTIYKKRPNSATIDILVKGKEKFKSLIIENQFEVILEILKLFSATRNVSDLQHIGGSKNAGNARVGNKISSLDNCILIYQSITGIFEKRIDLLKI

SEQ ID NO: 810 - protein, 1395 aa, Treponema denticola
MKKEIKDYFLGLDVGTGSVGWAVTDTDYKLLKANRKDLWGMRCFETAETAEVRRLHRGARRRIERRKKRIKLLQELFSQEIAKIDEGFFQRMKESPLYAEDKTILQENTLFNDKDFTDKTYHKAYPTINHLIKAWIENKVKPDPRLLYLACHNIIKKRGHFLFEGDFDSENQFDTSIQALFEYLREDMEVDIDADSQKVKEILKDSSLKNSEKQSRLNKMLGLKPSDKQKKAITNLISGNKINFADLYDNPDLKDAEKNSISFSKDDFDALSDDLASILGDSFELLLKAKAVYNCSVLSKVIGDEQYLSFAKVKIYEKHKTDLTKLKNVIKKHFPKDYKKVFGYNKNEKNNNNYSGYVGVCKTKSKKLIINNSVNQEDFYKFLKTILSAKSEIKEVNDILTEIETGTFLPKQISKSNAEIPYQLRKMELEKILSNAEKHFSFLKQKDEKGLSHSEKIIMLLTFKIPYYIGPINDNHKKSFPDRCWVVKKEKSPSGKTTPWNFFDHIDKEKTAEEFITSRTNFCTYLIGESVLPKNSLLYSEYTVLNEINNLQIIIDGKNICDTKLKQKIYEELFKKYKKITQKQISTFIKHEGICNKTDEVIILGIDKECTSSLKSYIELKNIFGKQVDEISTKNMLEEIIRWATIYDEGEGKTILKTKIKAEYGKYCSDEQIKKILNLKFSGWGRLSRKFLETVTSEMPGFSEPVNIITAMRETQNNLMELLSSEFKFTENIKKINSGFEDVEKQFSYDGLVKPLFLSPSVKKMLWQTLKLVKEISHITQAPPKKIFIEMAKGAELDPVRTKTRLKILQDLYNNCKNDADAFSSEIKDLSGKIENEDNLRLRSDKLYLYYTQLGKCMYCGKPIEIGHVFDTSNYDIDHIYPQSKIKDDSISNRVLVCSSCNKNKEDKYPLKAEIQSKQRGFWNFLQRNNFISLEKFNRLTRATPISDDETAKFIARQLVETRQATKVAARVLEKMFPETKIVYSKAETVSMFRNKFDIVKCREINDFHHAHDAYLNIVVGNVYNTKFTNNLWNFIKEKRDNPKIADTYNYYKVFDYDVKRNNITAWEKGKTIITVKDMLKRNTPIYTRQAACKKGGLFDQTIMKKGLGQHPLKKEGPFSNISKYGGYNKVSAAYYTLIEYEEKGNKIRSLETIPLYLVKDIQKDQDVLKSYLTDLLGKKEFKILVPKIKINSLLKINGFPCHITGKTNDSFLLRPAVQFCCSNDEVLYFKKIIRFSEIRSQREKIGKTISPYEDLSFRSYIKENLCKKTKNDEIGEKEFYDLLQKKNLEIYDMLLTKHKDTIYKKRPNSATIDILVKGKEKFKSLIIENQFEVILEILKLFSATRNVSDLQHIGGSKYSGVAKIGNKISSLDNCILIYQSITGIFEKRIDLLKV

SEQ ID NO: 811 - protein, 357 aa, Treponema denticola
MKKEIKDYFLGLDVGTGSVGWAVTDTDYKLLKANRKDLWGMRCFETAETAEVRRLHRGARRRIERRKKRIKLLQELFSQEIAKTDEGFFQRMKESPFYAEDKTILQENALFNDRDFTDKTYHKAYPTINHLIKAWIENKVKPDPRLLYLACHNIIKKRGHFLFEGDFDSENQFDTSIQAFFEYLREDMEVDIDADSQKIKEILKDSSLKNSEKQSRLNKILGLKSSDKQKKAITNLISGNKINFADLYDNPDLKDAEKNSISFSKDDFDALSDDLASILGDSFELLLKAKAVYNCSVLSKVIGDEQYLSFAKVKIYEKHKTDLTKLKNVIKKHFPKDYKKVFGYNKNEKITTITPDM

SEQ ID NO: 812 - protein, 1395 aa, Treponema denticola
MKKEIKDYFLGLDVGTGSVGWAVTDTDYKLLKANRKDLWGMRCFETAETAEVRRLHRGARRRIERRKKRIKLLQELFSQEIAKTDEGFFQRMKESPFYAEDKTILQENALFNDRDFTDKTYHKAYPTINHLIKAWIENKVKPDPRLLYLACHNIIKKRGHFLFEGDFDSENQFDTSIQALFEYLREDMEVDIDADSQKVKEILKDSSLKNSEKQSRLNKMLGLKPSDKQKKAITNLISGNKINFADLYDNPDLKDAEKNSISFSKDDFDALSDDLASILGDSFELLLKAKAVYNCSVLSKVIGDEQYLSFAKVKIYEKHKTDLTKLKNVIKKHFPNDYKKVFGYNKNEKNNNNYSAYVGVCKTKSKKLVINNTVNQEDFYKFLKPILLAKSEIKEVNDILTEIETGTFLPKQISKSNAEIPYQLRKMELEKILSNAEKHFSFLKQKDEKGLSHSEKIIMLLTFKIPYYIGPINDNHKKSFPDRCWVIKKEKSPSGKTTPWNFFDHIDKDKTAEAFITSRTNFCTYLVGESVLPKNSLLYSEYTVLNEINNLQIIIDGKNICDIKLKQKIYEELFKKYKKITQKQISTFIKHEGICNKTDEVIILGIDKECTSSLKSYIELKNIFGKQVDEISTKNMLEEIIRWATIYDEGEGKTILKTKIKAEYGKYCSDEQIKKILNLKFSGWGRLSRKFLETVTSEMPGFSEPVNIITAMRETQNNLMELLSSEFKFTENIKKINSGFEDVEKQFSYDSLVKPLFLSPSVKKMLWQTLKLVKEISHITQAPPKKIFIEMAKGAELDPVRTKTRLKILQDLYNNCKNDADAFSSEIKDLSGKIENEDNLRLRSDKLYLYYTQLGKCMYCGKPIEIGHVFDTSNYDIDHIYPQSKIKDDSISNRVLVCSSCNKNKEDKYPLKAEIQSKQRGFWNFLQRNNFISLEKLNRLTRTSPISDDETAKFIARQLVETRQATKVAAKVLEKMFPETKIVYSKAETVSMFRNKFDIIKCREINDFHHAHDAYLNIVVGNVYNTKFTNNPWNFIKEKRDNPKIADTYNYYKVFDYDVKRNNITAWEKGKTIITVKDMLKRNTPIYTRQAACKKGELFNQTIMKKGLGQHPLKKEGPLSNISKYGGYNKVSAAYYTLIEYEEKGSKIRSLETIPLYLVKDIQKNKDGLKSYLTDQIGKKEIKILIPKIKINSLLKINGFPCHITGKMGEAFVLRPAVQFCCSNDEALYFKKIIRFNEIRKQREKMGKTISPYEDLSFRSYIKDNLCKKTKADEIEEKEFYDLLQKKNLEIYDMLLTKHKDTIYKKRPNSATIDILVKGKEKFKSLIIENQFEVILEILKLFSATRNVSDLQHIGGSKNAGNARVGNKISSLDNCILIYQSITGIFEKRIDLLKI

SEQ ID NO: 813 - protein, 631 aa, Treponema denticola
MLWQTLKLVKEISHITQAPPKKIFIEMAKGAELEPARTKTRLKILQDLYNNCKNDADAFSSEIKDLSGKIENEDNLRLRSDKLYLYYTQLGKCMYCGKPIEIGHVFDTSNYDIDHIYPQSKIKDDSISNRVLVCSSCNKNKEDKYPLRSEIQSKQRGFWNFLQRNNFISLEKLNRLTRTTPISDDETAKFIARQLVETRQATKVAAKVLEKMFPETKIVYSKAETVSMFRNKFDIVKCREINDFHHAHDAYLNIVVGNIYNTKFTNNPWNFIKEKRDNPKIADTYNYYKVFDYDVKRNNITAWEKGKTIITVKDMLKRNTPIYTRQAACKKGGLFDQTIMKKGLGQHPLKKEGPFSNISKYGGYNKVSAAYYTLIEYEEKENKIRSLETIPLYLVKDIQKSQEKLKSYLTDLLGKKEIKILVPKIKINSLLKINGFPCHITGKTNDSFLLRPAVQFCCSNDEVLYFKKIIRFNEIRSQREKMGKTISPYEDLSFRSYIKENLCKKTKNDEIGEKEFYDLLQKKNLEIYDMLLTKHKDTIYNKRPNSTTLGMLTKGRYEFINLKPKDQIIVMLEILKLFCTTREAIDLGLIKGKPAAGVATLGKKISNLDNCILIYQSITGIFEKRIDLLKV

SEQ ID NO: 814 - protein, 631 aa, Treponema denticola
MLWQTLKLVKEISHITQAPPKKIFIEMAKGAELEPARTKTRLKILQDLYSSCKNDADAFSSEIQYLSGKIENEDNLRLRSDKLYLYYTQLGKCMYCGKPIEIGHVFDTSNYDIDHIYPQSKIKDDSISNRVLVCSSCNKNKEDKYPLKSEIQSKQRGFWNFLQRNNFISLEKLNRLTRTTPISDDETAKFIARQLVETRQATKVAAKVLEKMFPETKIVYSKAETVSMFRNKFDIIKCREINDFHHAHDAYLNIVVGNVYNTKFTNNPWNFIKEKRDNPKIADTYNYYKVFDYDVKRNNITAWEKGKTIITVKDMLKRNTPIYTRQAACKKGELFNQTIMKKGLGQHPLKKEGPFSNISKYGGYNKVSAAYYTLIEYEEKVNKIRSLETIPLYLVKDIQKDQDVLKSYLTDLLGKKEIKILVPKIKINSLLKINGFPCHITGKTGDSFVLRPAVQFCCSNDEVLYFKKIIRFNEIRSQREKMGKTISPYEDLSFRSYIKENLCKKTKADEIGEKEFYDLLQKKNLEIYDMLLTKHKDTIYNKRPNSTTLGMLTKGRYEFINLKPKDQIIVMLEILKLFCTTREAIDLGLIKGKPAAGVATLGKKISNLDNCILIYQSITGIFEKRIDLLKV

SEQ ID NO: 815 - protein, 370 aa, Treponema denticola
MTEIETGTFLPKQISKSNAEIPYQLRKMELEKILSNAEKHFSFLKQKDEKGLSHSEKIIMLLTFKIPYYIGPINDNHKKSFPDRCWVVKKEKSPSGKTTPWNFFDHIDKEKTAEEFITSRTNFCTYLVGESVLPKSSLLYSEYTVLNEINNLQIIIDGKNICDIKLKQKIYEELFKKYKKITQKQISTFIKHEGICNKTDEVIILGIDKECTSSLKSYIELKNIFGKQVDEISTKNMLEDIIRWAAIYDEGEGKTILKTKIKAEYGKYCSDEQIKKILNLKFSGWGRLSRKFLETVTSEMPGFSEPVNIITAMRETQNNLMELLSSEFKFTENIKKINSGFEDVEKQFSYDGLVKPLFLSPSVKKCCGRL

SEQ ID NO: 816 - protein, 591 aa, Treponema phagedenis
MARGKEAEKGRTSSRYASIKALYENCKQDLADYDAVLEQFKSEEPLRLRSDKLYLYYTQLGRCMYTGRVIDIDRLMSDNSAYDIDHIYPRSKIKDDSLTNRVLVVKDANQDKRDEPLSPQIQDKQKGFWDFLKHNNFISIEKYERLTYRGYFTEEMLSGFIARQLVETRQGTKTAGQILEQLYPDSTVVYCKAANTSEFRQKFNLIKCREINDLHHAHDAYLNIAVGNVYYTKFTSNPRNFMKLKEPYNLRELFDRDVERNNTIAWVKNKTITTIKDMLKRNTPLYTRYAYCKTGGFFDQNIMKKGKGQFPLKENSPLSDISKYGGYNKVSGAYFILVQKKEKDAVVRILETVPLYLLNKPGKESENVREYLSTALGTKDFKILIPKIKINSLFKINGFLVHITGKTNDRFLVRSAVQFFCDDNLTLFFKRIIAFNGLRNLNKDKSMTAYDDNTMRVYVRGNLFKDKNQLFDKNKFNEIVKGKNISVYKDMVKRYETSIYKFRPNTAVIPILKSGEDKFINLPIEEQFKILQEILKLFGAINGTANLTLIGGRPSTGEMKISNNISNLKQCILIHQSPTGVFEQQIDLLKI

SEQ ID NO: 817 - protein, 1062 aa, Treponema sp.
MIMKLEKWRLGLDLGTNSIGWSVFSLDKDNSVQDLIDMGVRIFSDGRDPKTKEPLAVARRTARSQRKLIYRRKLRRKQVFKFLQEQGLFPKTKEECMTLKSLNPYELRIKALDEKLEPYELGRALFNLAVRRGFKSNRKDGSREEVSEKKSPDEIKTQADMQTHLEKAIKENGCRTITEFLYKNQGENGGIRFAPGRMTYYPTRKMYEEEFNLIRSKQEKYYPQVDWDDIYKAIFYQRPLKPQQRGYCIYENDKERTFKAMPCSQKLRILQDIGNLAYYEGGSKKRVELNDNQDKVLYELLNSKDKVTFDQMRKALCLADSNSFNLEENRDFLIGNPTAVKMRSKNRFGKLWDEIPLEEQDLIIETIITADEDDAVYEVIKKYDLTQEQRDFIVKNTILQSGTSMLCKEVSEKLVKRLEEIADLKYHEAVESLGYKFADQTVEKYDLLPYYGKVLPGSTMEIDLSAPETNPEKHYGKISNPTVHVALNQTRVVVNALIKEYGKPSQIAIELSRDLKNNVEKKAEIARKQNQRAKENIAINDTISALYHTAFPGKSFYPNRNDRMKYRLWSELGLGNKCIYCGKGISGAELFTKEIEIEHILPFSRTLLDAESNLTVAHSSCNAFKAERSPFEAFGTNPSGYSWQEIIQRANQLKNTSKKNKFSPNAMDSFEKDSSFIARQLSDNQYIAKAALRYLKCLVENPSDVWTTNGSMTKLLRDKWEMDSILCRKFTEKEVALLGLKPEQIGNYKKNRFDHRHHAIDAVVIGLTDRSMVQKLATKNSHKGNRIEIPEFPILRSDLIEKVKNIVVSFKPDHGAEGKLSKETLLGKIKLHGKETFVCRENIVSLSEKNLDDIVDEKIKSKVKDYVAKHKGQKIEAVLSDFSKENGIKKVRCVNRVQTPIEITSGKISRYLSPEDYFAAVIWEIPGEKKTFKAQYIRRNEVEKNSKGLNVVKPAVLENGKPHPAAKQVCLLHKDDYLEFSDKGKMYFCRIAGYAATNNKLDIRPVYAVSYCADWINSTNETMLTGYWKPTPTQNWVSVNVLFDKQKARLVTVSPIGRVFRK

SEQ ID NO: 818 - protein, 281 aa, Treponema vincentii
MKTLGLDIGTNSIGWGIVDETANKIEDCGVYIFPEGVKKEKGNESSKAAERTSFRLARRLKFRRKLRKCETLKVLIKNKMCPLTMEELEKWRKQKIYPVSQDFLNWYRTDELKNWEPYFLRKKCAEQKAGPYEIGRALYHLAQRRGFLSNRKESTKASDGKVSKSIDELSSLMDGRTLGQYFYELKQSGEKVRGKYTSRKEHYEKEFNKICEVQEISPELKDDLYRAIFFQRKLKSQKFLVGKCTFERNKPRAPISHFEFEEFRMLSFINSIKIAKKLRRR

SEQ ID NO: 819 - protein, 675 aa, uncultured bacterium
MTAENYSNVRFAFDIGTNSIGWAVFQLNDKQEATSILNAGARIFSDGRDPKTFEPLAVRRRNVRSASRMRDRYLRRRKRTLDKLIGYGLLPEDKAERDKILLETNDKPSGSTDKKTDPYSLRARALEEKLPLAYVARALFHIGQRRGFKSNRKADRKSNEKGKIAAGIEELSGLMHQSHAPTLGAYLAKRREEGHVVRLRASSEALTNKAYAFYPERAMLEDEFHKIWQAQAEYYPDVLTKEREEELFHVMFFQRPLKEQKVGLCTLVEGELRLPKSDPLFQQFRLYKEINELAIILPDLSQRKLTMEERDTLITLMRPAKTKTFAALRKALKIPAGGRFNKETENRKQLTGDEVYSVFSKPELFGGDWAKFSIEQQREIIDQLNNEENPDKLEEWLKNKFPKLSDEQRSEIINANLPDGYGRFGITATSKILEQLKKDVISEAEAAHRCGFDHSLANRNWKGLDELPRYQEVLERHIVPGTGDKNDIYDIYKGRLTNPTVHIGLNQVRRLTNRLIKAYGKPWQIVVELARDLPMSSEERKEHNKTLNDNIKAGFERTQKLERLGQKDNANNRLLLKLWEELGKDPDDRKSIYSGTRITEPMLFSGEVEIDHILPFSLTYDDSYANKILCLREENRIKRNRAPADVTEWKDRYDEIIGRSKNCQRTNKNVLGPMQ

SEQ ID NO: 820 - protein, 1017 aa, uncultured bacterium]
MRVDSLGRCLSDEEWARVIYHLCKHRGFHWISRAEAKQTEGDSKSEGGKVKQGLAGTAKLMDEKGYRSAAEMVLAEFPEAQRNKQGEYRKALSRELLAKELALLFARQRVFGNRHATDTLETAILGNSDKKSGLFWQQKPALAGADLLKMLGTCTFEKNEYRAPKASFTAERHVWLTRLNNLRIVTDGITRQLTEQERQLVLPLPYRQAGDLTYKQLGMALTKAGLLEAGCFKFIGLAYPTEAQKAEGKTKDPESATLVKIPAWQELRQTLNKASLNDEWEKLSGDALCGQPEIFDKIAWILSVYKDDDEVRTELAKLVLPNPEGLTEALLNIRFDKFHALSLKALRAIVPHMEKGLRYDEACVQAGYHHSQLHKIGEGEHKYLPPLYDGRDGDGRMIFAEDADIPRNPVVLRSLNQARKVVNAIIRRYGSPSAVHIEMARDLSRPFDERNKIKKDQDEYQARNQRDREQFIELFGHPPKGLEFEKWRLYREQNGQCAYSQKPLASSGDVAEIFLDGSTEIDHALPYSRSFDDSKNNKVLVLTRENRDKGNRTPYEYLGGAENSERWQRFFSFVESNKAYRLAKRTRLLRKDFGAKESEEFRERNLNDTRYVCRFFKNYVEQHLKLAEGSEAKRCVVVSGQLTNFLRTRWGLLKIRSDSDRHHALDAAVVAACSHSMVQRLSNYSRTRELEQVRDGFVNIETGEIVNPAMHQQLREHFPDPWPYFRHELEARLKIDSPALLREEMARLSSYTEEELAALKPLFVSRAPQRRNGGAAHKDTIYGQPEKLKKNGSVSQKVALASLALKDIDLLADPHRNAKLYGAIRERLEAHGGKGDKAFPATNPLRKPDKEGNPTGPIVRTVTKVIDKLSGIPVRGGIAKNDTMLRVDVFTKAGRFHLVPVYVHHRVTGLPNQAITRGKDENQWAIIDDTFEWRFSLYPNDLVQIRLKDETHLGYYASTDRSTSSISIWAHDRNQSVGKDGLIRSIGVTTAKDIEKFHVDTLGNVYPAPPEKRRGLA

SEQ ID NO: 821 - protein, 600 aa, uncultured bacterium]
VNAIIKKHGSLSAVHIEMARDLSRPLDERREVKKLQEEFKDRNDKARESFEADHGYRPKGIVFEKWMLYREQHGKCAYSMEGLDIDRVLNDANYAQIDHALPYSRSYDDSKNNKVLVLTRENQNKGNRTAYEYLTSFAGGEDGDRWRNYAAWVNSNKSYRMAKRNRLLRKNYGPDEASGFKDRNLNDTRYICKFFKNYVEEHLQLAPRADGNANKRCVVVNGQLTAFLRARWGLSKVRSESDRHHALDAAVVAACSHGMVKALADYARNKEVAYLREGFPDPETGEIINPEAHARGVHHFPEPWAHFRHELQVRLYSDDLQALREDLQRLGTYSEQDLLGVRTLFVSRAPQRRNDGAVHKETIYAQPEALRKQGGVVQKVPLTSLSLKDLDNLADPHRNAKLYTALRARLEAHGGKADKAFGPDQPFYKPDKNGNPTGPIVRTIKLVIDKLSGIPIRGGVAKNDTMLRVDVFTKAGKFHLVPVYVHHRVTGLPDRAIVAFKDEVEWTQVDDSFKFLFSIHPNDLIRIGLKAKEPMIGYFASCHRGTGAFNVWSHDRNTSVGKSGSVEGIGIKTALSLEKLNIDVLGNVYPARPEQRHGLA

SEQ ID NO: 822 - protein, 1011 aa, uncultured delta
MSSKAIDSLEQLDLFKPQEYTLGLDLGIKSIGWAILSGERIANAGVYLFETAEELNSTGNKLISKAAERGRKRRIRRMLDRKARRGRHIRYLLEREGLPTDELEEVVVHQSNRTLWDVRAEAVERKLTKQELAAVLFHLVRHRGYFPNTKKLPPDDESDSADEEQGKINRATSRLREELKASDCKTIGQFLAQNRDRQRNREGDYSNLMARKLVFEEALQILAFQRKQGHELSKDFEKTYLDVLMGQRSGRSPKLGNCSLIPSELRAPSSAPSTEWFKFLQNLGNLQISNAYREEWSIDAPRRAQIIDACSQRSTSSYWQIRRDFQIPDEYRFNLVNYERRDPDVDLQEYLQQQERKTLANFRNWKQLEKIIGTGHPIQTLDEAARLITLIKDDEKLSDQLADLLPEASDKAITQLCELDFTTAAKISLEAMYRILPHMNQGMGFFDACQQESLPEIGVPPAGDRVPPFDEMYNPVVNRVLSQSRKLINAVIDEYGMPAKIRVELARDLGKGRELRERIKLDQLDKSKQNDQRAEDFRAEFQQAPRGDQSLRYRLWKEQNCTCPYSGRMIPVNSVLSEDTQIDHILPISQSFDNSLSNKVLCFTEENAQKSNRTPFEYLDAADFQRLEAISGNWPEAKRNKLLHKSFGKVAEEWKSRALNDTRYLTSALADHLRHHLPDSKIQTVNGRITGYLRKQWGLEKDRDKHTHHAVDAIVVACTTPAIVQQVTLYHQDIRRYKKLGEKRPTPWPETFRQDVLDVEEEIFITRQPKKVSGGIQTKDTLRKHRSKPDRQRVALTKVKLADLERLVEKDASNRNLYEHLKQCLEESGDQPTKAFKAPFYMPSGPEAKQRPILSKVTLLREKPEPPKQLTELSGGRRYDSMAQGRLDIYRYKPGGKRKDEYRVVLQRMIDLMRGEENVHVFQKGVPYDQGPEIEQNYTFLFSLYFDDLVEFQRSADSEVIRGYYRTFNIANGQLKISTYLEGRQDFDFFGANRLAHFAKVQVNLLGKVIK

SEQ ID NO: 823 - protein, 1011 aa, uncultured delta proteobacterium HF0070_07E19; identical to SEQ ID NO: 822

SEQ ID NO: 824 - protein, 1120 aa, Veillonella sp.
MGFKANLVNLFTDEDIEVILPEEKEFKSINLHEGIYEDVRDAYEDAWGDRFAIVDQCKVLHDIIVISSIIKPGQSLSEAKIESYNQHKEDLVLLKSVLKEDRKLYDDMFVVDTDKGTNYVKYTKQGVNGNTSATQEEFYKYVRKVVSVLPETEHTRRIVQKLEEGTFLPLQRISKNGVVPYQLHKEELVRILDKATVNFPFLNKVENGLTVADKIISILEFKIPYYVGPLNPTHSIENGGFAWVVRKEAGQVLPWNFEQKVDVQASAVKFIENLTNKCTYLIDQDVLPKYSLLYAEFSLLNELNNIRVNDKPLPADVKQAFIRDHFISLQDSKTATKKVVAKYLVDNNYVSQPPIITGMDQQIATKLTSHRDMTRILGEHFDHAMAEDIIRYITIFGESKDMLRQVLKNYYGDRLTTEQIKKLGKLTYTGWGRLSKKFLSDIWGMKKNDDDAEAGTIIEHMREGQENLMQLLSSSYSFIDVVQEYVTNVLGEKEKTAFEMLEDLSLSPMVKRSVWQTLRILDEIVSIRKELPKKIFVEVARTNKADKKRTQSRKALLEELYKQIKDEDVHVLQQELESKEDSALNSKKLYLYFTQMGRCMYSGRRIDIHELFTDKYDIDHIYPRSLTKDDSWHNIVLVEKQLNAEKTDRFPILSAIQSKQKGFWKLLWDRGFISEKKYDRLVRTTDLTDEELNQFINRQMVSTNQSVKAVTTLLHQLYPETEVVFSKAENVSDFRHDYDFVKVRSINHHHHAKDAYLNIVVGNVYHEKFTKNFLSFAKQKGTRRTYNLTKIFEYEIKLTEESKKVIWDPNIHMDIVKKMMKSNDVRVTQRAVPQKGGLSDETIYKKGIAKRGVYLPLKSSDERVRDVEKYGGRTSITISEYIILNIRDTSDQDRIEIFSLPLYIAGKKDIHKAIEEAYLSTCKKPASVVDIQILYRGLYIGSKVNINGFTYYMGGKTGSNVSIDSAVDVVMDITSSVYIKLLEKVAIKKIENPKTFRIENIKTSYNHKEVTVSKEQNIALYQELLKKLDTPLFSKMKGNKLEEFRTVGFDTFIALSLEEQASVLLEVLNVLTNFKTKRDITKIGMTSSRSTLGINISNTEQFSVITTSITGLYEQEIKIK

SEQ ID NO: 825 - protein, 983 aa, Verminephrobacter aporrectodeae
MRRRRDRLLKRKARMHDQLMRHGFFPADAAGRKVLERLNPYQLRAKGLHQALTPGEFARALFHINQRRGFQSNRKTDRKDNESGALKQAISELRAQIHDSGCATVGEWFWKERMQQKPEGVHRQGVRARYRETPYTTDEGRQRIDKRYDLYVDRAMIEQEFDALWAVQAALQPGLFTDAACKELRYTLLFQRKLRPVKPGRCTLLPEEERAPLALPSTQRFRILQEVNHLRLLDEALREVPLTLAQRDALVAALESQGKLGFAPMRKLLKLPGTVKFNLEDEKRTELKGNATSAILARKDLFGPAWAGFDAALQDEIVWQLVSEEGEGRLIAWLQQHTGVDEARAEAIADTSLPEGYGSLSRKALERIVPALQREVCSYDKAVQAAGFAHHSDLGFDFEHSGDEVQQVGERIIASTGEVRPLFAFKQLPYYGKALQRHVAFGSGKPEDPEEKRHGKIANPTVHIGLNQVRTVVNALIRRYGRPSEVVVELARDLKQSREQQQETQRKQAENQRRNTRIRERIAETLGISPERVRSSDIQKWILWEELSFDVVDRRCPYSGEQISTTMLLSPKVEIEHILPFSQTLDDSLNNRTVALREANRIKRNRTPWDARADFEARGWSYEGILHRAERMPLRKRYRFAPDGYQRWLGEDKDFLARALNDTRYLSRVAANYLRLVCPKPQGVRVIPGRMTAMLRAKFGLNDVLGLDGEKNRNDHRHHAVDACVIGVTDQGLMQRFARASAQAREDGLTRLVQDMPLPWPSYRDHVERAVRHIWVSHKPDHGFEGAMMEETAYGIRKDGSIKPRRKADGSAGREVVNLIRITESRQPVRHGVDSQGQPLPYKGYVGGSNYCIEITANDQGKWEGAVISTFEAYRIVRASGWGRLRHCSHGQNGRPLMMRLMIGDAVRLALDGSEKTMRVVKISANGQVFLVAPNEANVDARNRDKADPFAYVSKKAGSFQSAKARQVSISPIGELRDPGFKG

SEQ ID NO: 826 - protein, 1367 aa, Streptococcus pyogenes
MDKKYSIGLDIGTNSVGWAVITDDYKVPSKKLKVLGNTDRHGIKKNLIGALLFDSGETAEATRLKRTARRRYTRRKNRICYLQEIFSNEMAKVDDSFFHRLEESFLVEEDKKHERHPIFGNIVDEVAYHEKYPTIYHLRKKLADSTDKVDLRLIYLALAHMIKFRGHFLIEGDLNPDNSDVDKLFIQLVQTYNQLFEENPINASRVDAKAILSARLSKSRRLENLIAQLPGEKKNGLFGNLIALSLGLTPNFKSNFDLAEDAKLQLSKDTYDDDLDNLLAQIGDQYADLFLAAKNLSDAILLSDILRVNSEITKAPLSASMIKRYDEHHQDLTLLKALVRQQLPEKYKEIFFDQSKNGYAGYIDGGASQEEFYKFIKPILEKMDGTEELLAKLNREDLLRKQRTFDNGSIPYQIHLGELHAILRRQEDFYPFLKDNREKIEKILTFRIPYYVGPLARGNSRFAWMTRKSEETITPWNFEEVVDKGASAQSFIERMTNFDKNLPNEKVLPKHSLLYEYFTVYNELTKVKYVTEGMRKPAFLSGEQKKAIVDLLFKTNRKVTVKQLKEDYFKKIECFDSVEISGVEDRFNTSLGTYHDLLKIIKDKDFLDNEENEDILEDIVLTLTLFEDKEMIEERLKKYANLFDDKVMKQLKRRHYTGWGRLSRKLINGIRDKQSGKTILDFLKSDGFANRNFMQLINDDSLTFKEAIQKAQVSGQGHSLHEQIANLAGSPAIKKGILQTVKIVDELVKVMGHKPENIVIEMARENQTTQKGQKNSRERMKRIEEGIKELGSQILKEHPVENTQLQNEKLYLYYLQNGRDMYVDQELDINRLSDYDVDHIVPQSFLKDDSIDNKVLTRSDKNRGKSDNVPSEEVVKKMKNYWRQLLNAKLITQRKFDNLTKAERGGLSELDKAGFIKRQLVETRQITKHVAQILDSRMNTKYDENDKLIREVKVITLKSKLVSDFRKDFQFYKVREINNYHHAHDAYLNAVVGTALIKKYPKLESEFVYGDYKVYDVRKMIAKSEQEIGKATAKYFFYSNIMNFFKTEITLANGEIRKRPLIETNGETGEIVWDKGRDFATVRKVLSMPQVNIVKKTEVQTGGFSKESILPKRNSDKLIARKKDWDPKKYGGFDSPTVAYSVLVVAKVEKGKSKKLKSVKELLGITIMERSSFEKNPIDFLEAKGYKEVRKDLIIKLPKYSLFELENGRKRMLASAGELQKGNELALPSKYVNFLYLASHYEKLKGSPEDNEQKQLFVEQHKHYLDEIIEQISEFSKRVILADANLDKVLSAYNKHRDKPIREQAKNIIHLFTLTNLGAPAAFKYFDTTIERNRYKSIKEVLDATLIHQSITGLYEIRIDLSQLGGD

SEQ ID NO: 827 - protein, 15 aa, artificial sequence
  Synthetic sequence
IGLDIGTNSVGWAVI

SEQ ID NO: 828 - protein, 8 aa, artificial sequence
  Synthetic sequence
IVIEMARE

SEQ ID NO: 829 - protein, 27 aa, artificial sequence
  Synthetic sequence
DVDHIVPQSFLKDDSIDNKVLTRSDKN

SEQ ID NO: 830 - protein, 8 aa, artificial sequence
  Synthetic sequence
HHAHDAYL

SEQ ID NO: 831 - RNA, 86 nt, Artificial Sequence
  Synthetic sequence
ggaaccauucaaaacagcauagcaaguuaaaauaaggcuaguccguuaucaacuugaaaaaguggcaccgagucggugcuuuuuuu

SEQ ID NO: 832 - RNA, 67 nt, Artificial Sequence
  Synthetic sequence
uagcaaguuaaaauaaggcuaguccguuaucaacuugaaaaaguggcaccgagucggugcuuuuuuu

SEQ ID NO: 833 - RNA, 88 nt, Streptococcus pyogenes
guuggaaccauucaaaacagcauagcaaguuaaaauaaggcuaguccguuaucaacuugaaaaaguggcaccgagucggugcuuuuuu

SEQ ID NO: 834 - RNA, 93 nt, Listeria innocua
auauuguuaguauucaaaauaacauagcaaguuaaaauaaggcuuuguccguuaucaacuuuuaauuaaguagcgcuguuucggcgcuuuuuu

SEQ ID NO: 835 - RNA, 104 nt, Streptococcus mutans
uguuggaaucauucgaaacaacacagcaaguuaaaauaaggcagugauuuuuaauccaguccguacacaacuugaaaaagugcgcaccgauucggugcuuuuuu

SEQ ID NO: 836 - RNA, 95 nt, Streptococcus thermophilus
uugugguuugaaaccauucgaaacaacacagcgaguuaaaauaaggcuuaguccguacucaacuugaaaagguggcaccgauucgguguuuuuuu

SEQ ID NO: 837 - RNA, 118 nt, Streptococcus thermophilus
uaauaauaguguaagggacgccuuacacaguuacuuaaaucuugcagaagcuacaaagauaaggcuucaugccgaaaucaacacccugucauuuuauggcaggguguuuucguuauuu

SEQ ID NO: 838 - RNA, 112 nt, Neisseria meningitidis
cauauugucgcacugcgaaaugagaaccguugcuacaauaaggccgucugaaaagaugugccgcaacgcucugccccuuaaagcuucugcuuuaaggggcaucguuuauuuc

SEQ ID NO: 839 - RNA, 110 nt, Pasteurella multocida
gcauauuguugcacugcgaaaugagagacguugcuacaauaaggcuucugaaaagaaugaccguaacgcucugccccuugugauucuuaauugcaaggggcaucguuuuu

SEQ ID NO: 840 - RNA, 115 nt, Mycoplasma mobile
uauuauguauuucgaaauacagauguacaguuaagaauacauaagaaugauacaucacuaaaaaaaggcuuuaugccguaacuacuacuuauuuucaaaauaaguaguuuuuuuu

SEQ ID NO: 841 - RNA, 26 nt, Artificial Sequence
  Synthetic sequence
uagcaaguuaaaauaaggcuaguccg

SEQ ID NO: 842 - RNA, 36 nt, Streptococcus pyogenes
uuguuggaaccauucaaaacagcauagcaaguuaaa

SEQ ID NO: 843 - RNA, 36 nt, Streptococcus mutans
guguuggaaucauucgaaacaacacagcaaguuaaa

SEQ ID NO: 844 - RNA, 36 nt, Streptococcus thermophilus
gguuugaaaccauucgaaacaacacagcgaguuaaa

SEQ ID NO: 845 - RNA, 36 nt, Streptococcus thermophilus
cuuacacaguuacuuaaaucuugcagaagcuacaaa

SEQ ID NO: 846 - RNA, 36 nt, Listeria innocua
auauuguuaguauucaaaauaacauagcaaguuaaa

SEQ ID NO: 847 - RNA, 34 nt, Listeria innocua
auuguuaguauucaaaauaacauagcaaguuaaa

SEQ ID NO: 848 - RNA, 36 nt, Treponema denticola
auuuaagauccaucuuaaauuacacaacgaguucaa

SEQ ID NO: 849 - RNA, 36 nt, Neisseria meningitidis
auugucgcacugcgaaaugagaaccguugcuacaau

SEQ ID NO: 850 - RNA, 38 nt, Neisseria meningitidis
auauugucgcacugcgaaaugagaaccguugcuacaau

SEQ ID NO: 851 - RNA, 36 nt, Streptococcus gordonii; identical to SEQ ID NO: 845

SEQ ID NO: 852 - RNA, 36 nt, Bifidobacterium bifidum
augaucaaggucauugaccugacaggcauaaauuga

SEQ ID NO: 853 - RNA, 36 nt, Lactobacillus salivarius
gguuuugaccucauugauuuaacauucugaguugaa

SEQ ID NO: 854 - RNA, 37 nt, Francisella tularensis
guuucaguuguuagauuauuugguauguacuuguguu

SEQ ID NO: 855 - RNA, 37 nt, Francisella tularensis
auuacagagcauuaauuauuugguacauuuauaauuu

SEQ ID NO: 856 - RNA, 37 nt, Legionella pneumophila
auuucaggguaucgaaauuuagaugauuucuaauuua

SEQ ID NO: 857 - RNA, 36 nt, Nitratifractor salsuginis
uguaacaggguaggguuuuuugaggggucuuaaaau

SEQ ID NO: 858 - RNA, 36 nt, Butyrivibrio fibrisolvens
aguuucuaaucacuuaauuuuuucggaccuacuaaa

SEQ ID NO: 859 - RNA, 36 nt, Streptobacillus moniliformis
gauucacauuauucaaguuuacuacagauucuguau

SEQ ID NO: 860 - RNA, 36 nt, Mycoplasma mobile
aguuaagaauacauaagaaugauacaucacuaaaaa

SEQ ID NO: 861 - RNA, 44 nt, Capnocytophaga ochracea
auugugaauugcuuucaaauugugcgacaaaaguagguauaaua

SEQ ID NO: 862 - RNA, 36 nt, Acidovorax ebreus
auugcagcaacggcucucaccccggauaaccacaau

SEQ ID NO: 863 - RNA, 36 nt, Wolinella succinogenes
auagccgcugccuacucagccauuuagcgcagcgac

SEQ ID NO: 864 - RNA, 37 nt, Wolinella succinogenes
uuuguuaaagcuggaugggauuauuauagaguguugc

SEQ ID NO: 865 - RNA, 37 nt, Wolinella succinogenes
uuucaaggcaucgaacggauuugcuauaaaguguugc

SEQ ID NO: 866 - RNA, 36 nt, Prevotella ruminicola
uuuugcacacguaagauuccuacaucuuaucacaau

SEQ ID NO: 867 - RNA, 48 nt, Fibrobacter succinogenes
auugugaauugcuuucagauuaugaaaauaauauaguuaaaauuuuug

SEQ ID NO: 868 - RNA, 36 nt, Campylobacter jejuni
auuuuauuucgauuuuaaucaacccuaaauuucaau

SEQ ID NO: 869 - RNA, 36 nt, Campylobacter jejuni
auuuuagucccuuuuuaaauuucuuaugagauuaua

SEQ ID NO: 870 - RNA, 25 nt, Campylobacter jejuni
aagaaauuuaaaaagggacuaaaau

SEQ ID NO: 871 - RNA, 36 nt, Pasteurella multocida
auuguagcaacgucucucauuucgcagugcaacaau

SEQ ID NO: 872 - RNA, 36 nt, Rhodopseudomonas palustris
gccguggcuuuccuaccgauuucccaccgcaugauu

SEQ ID NO: 873 - RNA, 36 nt, Olsenella uli
ucugaauuaccagucagaacgauacugcgagucaaa

SEQ ID NO: 874 - RNA, 36 nt, Rhodospirillum rubrum
guuccauggccccgucccacacgccaugauagagcg

SEQ ID NO: 875 - RNA, 36 nt, Rhodospirillum rubrum
aaacgggagaaccgucccacacggccaugguagagu

SEQ ID NO: 876 - RNA, 36 nt, Dinoroseobacter shibae
uuaacggcucgaccgcgaauucugaacguaaagaca

SEQ ID NO: 877 - RNA, 36 nt, Verminephrobacter eiseniae
uuagcguccagagcgcauaucccagugagauauccg

SEQ ID NO: 878 - RNA, 75 nt, Streptococcus pyogenes
aaacagcauagcaaguuaaaauaaggcuaguccguuaucaacuugaaaaaguggcaccgagucggugcuuuuuuu

SEQ ID NO: 879 - RNA, 77 nt, Listeria innocua
aaauaacauagcaaguuaaaauaaggcuuuguccguuaucaacuuuuaauuaaguagcgcuguuucggcgcuuuuuu

SEQ ID NO: 880 - RNA, 73 nt, Artificial Sequence
  Synthetic sequence
aacagcauagcaaguuaaaauaaggcuaguccguuaucaacuugaaaaaguggcaccgagucggugcuuuuuu

SEQ ID NO: 881 - RNA, 33 nt, Francisella novicida
uauaaauguaccaaauaauuaaugcucuguaau

SEQ ID NO: 882 - RNA, 74 nt, Campylobacter jejuni
aagaaauuuaaaaagggacuaaaauaaagaguuugcgggacucugcgggguuacaauccccuaaaaccgcuuuu

SEQ ID NO: 883 - RNA, 96 nt, Francisella novicida
aucuaaaauuauaaauguaccaaauaauuaaugcucuguaaucauuuaaaaguauuuugaacggaccucuguuugacacgucugaauaacuaaaaa

SEQ ID NO: 884 - RNA, 109 nt, Streptococcus thermophilus2
uguaagggacgccuuacacaguuacuuaaaucuugcagaagcuacaaagauaaggcuucaugccgaaaucaacacccugucauuuuauggcaggguguuuucguuauuu

SEQ ID NO: 885 - RNA, 110 nt, Mycoplasma mobile
uguauuucgaaauacagauguacaguuaagaauacauaagaaugauacaucacuaaaaaaaggcuuuaugccguaacuacuacuuauuuucaaaauaaguaguuuuuuuu

SEQ ID NO: 886 - RNA, 92 nt, Listeria innocua
auuguuaguauucaaaauaacauagcaaguuaaaauaaggcuuuguccguuaucaacuuuuaauuaaguagcgcuguuucggcgcuuuuuuu

SEQ ID NO: 887 - RNA, 89 nt, Streptococcus pyogenes
guuggaaccauucaaaacagcauagcaaguuaaaauaaggcuaguccguuaucaacuugaaaaaguggcaccgagucggugcuuuuuuu

SEQ ID NO: 888 - RNA, 107 nt, Streptococcus mutans
guuggaaucauucgaaacaacacagcaaguuaaaauaaggcagugauuuuuaauccaguccguacacaacuugaaaaagugcgcaccgauucggugcuuuuuuauuu

SEQ ID NO: 889 - RNA, 96 nt, Streptococcus thermophilus
uugugguuugaaaccauucgaaacaacacagcgaguuaaaauaaggcuuaguccguacucaacuugaaaagguggcaccgauucgguguuuuuuuu

SEQ ID NO: 890 - RNA, 102 nt, Neisseria meningitidis
acauauugucgcacugcgaaaugagaaccguugcuacaauaaggccgucugaaaagaugugccgcaacgcucugccccuuaaagcuucugcuuuaaggggca

SEQ ID NO: 891 - RNA, 110 nt, Pasteurella multocida; identical to SEQ ID NO: 839

SEQ ID NO: 892 - RNA, 37 nt, Francisella novicida
aacacaaguacauaccaaauaaucuaacaacugaaac

SEQ ID NO: 893 - RNA, 37 nt, Francisella novicida
aaauuauaaauguaccaaauaauuaaugcucuguaau

SEQ ID NO: 894 - RNA, 37 nt, Wolinella succinogenes; identical to SEQ ID NO: 865

SEQ ID NO: 895 - RNA, 37 nt, Wolinella succinogenes; identical to SEQ ID NO: 864

SEQ ID NO: 896 - RNA, 37 nt, gamma proteobacterium
auuucaguguauagaauguugggaugcauucugaaua

SEQ ID NO: 897 - RNA, 37 nt, gamma proteobacterium
auaacaagggaguauuugcuggaauaagcucugaaac

SEQ ID NO: 898 - RNA, 37 nt, Sutterella wadsworthensis
guuuccaagcaauagcucguggcguuaugauuucugu

SEQ ID NO: 899 - RNA, 37 nt, Sutterella wadsworthensis
ggugauuuccuauagcucauagcguuaugaucucuaa

SEQ ID NO: 900 - RNA, 37 nt, Legionella pneumophila; identical to SEQ ID NO: 856

SEQ ID NO: 901 - RNA, 36 nt, Listeria innocua; identical to SEQ ID NO: 846

SEQ ID NO: 902 - RNA, 36 nt, Streptococcus thermophilus; identical to SEQ ID NO: 844

SEQ ID NO: 903 - RNA, 36 nt, Streptococcus mutans; identical to SEQ ID NO: 843

SEQ ID NO: 904 - RNA, 36 nt, Streptococcus pyogenes; identical to SEQ ID NO: 842

SEQ ID NO: 905 - RNA, 36 nt, Fusobacterium nucleatum
auuuuuaauuuaaguaauaaaaaauggagcauauac

SEQ ID NO: 906 - RNA, 36 nt, Filifactor alocis
aguugacuaccauaugagauuacacuacacgguuca

SEQ ID NO: 907 - RNA, 36 nt, Treponema denticola; identical to SEQ ID NO: 848

SEQ ID NO: 908 - RNA, 36 nt, Solobacterium moorei
cuuauaccaguaagauaauuuacauaguaaguucaa

SEQ ID NO: 909 - RNA, 36 nt, Veillonella atypica
guuuuggagguuuacagaauuacacuacgaguucaa

SEQ ID NO: 910 - RNA, 36 nt, Finegoldia magna
guuuaauaccuauaugagauuacaucaugaguucaa

SEQ ID NO: 911 - RNA, 36 nt, Olsenella uli; identical to SEQ ID NO: 873

SEQ ID NO: 912 - RNA, 36 nt, Lactobacillus rhamnosus
caacuugaauugauugaucugacaucuacgaguuga

SEQ ID NO: 913 - RNA, 36 nt, Lactobacillus gasseri
ugauuagauuucauugaucuaacagccaucuaaaac

SEQ ID NO: 914 - RNA, 36 nt, Lactobacillus gasseri
acacuaaacuuuauugaucuaacaaccagauuuaaa

SEQ ID NO: 915 - RNA, 36 nt, Oenococcus kitaharae
ggguucuaccucauugaucugacacacagcauugaa

SEQ ID NO: 916 - RNA, 36 nt, Bifidobacterium bifidum; identical to SEQ ID NO: 852

SEQ ID NO: 917 - RNA, 36 nt, Staphylococcus pseudintermedius
guuuuacuucuuucuaaauaaacauaguuaaguuaa

SEQ ID NO: 918 - RNA, 36 nt, Eubacterium rectale
auuuuauagucacguaaauuuuucagaucuacuaaa

SEQ ID NO: 919 - RNA, 38 nt, Enterococcus faecalis
auuuuacugauaagaaauuauugagaaucuacaaaaau

SEQ ID NO: 920 - RNA, 36 nt, Streptococcus thermophilus; identical to SEQ ID NO: 845

SEQ ID NO: 921 - RNA, 36 nt, Staphylococcus lugdunensis
cuuguacuuauaccuaaaauuacagaaucuacugaa

SEQ ID NO: 922 - RNA, 36 nt, Eubacterium dolichum
aucauaaucuagcaaaaguuuauaugaucuaacaaa

SEQ ID NO: 923 - RNA, 36 nt, Mycoplasma mobile; identical to SEQ ID NO: 860

SEQ ID NO: 924 - RNA, 36 nt, Mycoplasma ovipneumoniae
auuuuacucuaguaagaaauugucgcacaaaaauaa

SEQ ID NO: 925 - RNA, 36 nt, Mycoplasma gallisepticum
auuauugcuuacacaauuauugucgugcuaaaauaa

SEQ ID NO: 926 - RNA, 36 nt, Mycoplasma canis
auuauuguuuacccaaauauuguacauccuaaauca

SEQ ID NO: 927 - RNA, 36 nt, Mycoplasma synoviae
uacuuacuuaacaaaauaauuguacgauuccaaaau

SEQ ID NO: 928 - RNA, 36 nt, Aminomonas paucivorans
gccuucccucccugccgaaggagcagauccucuccu

SEQ ID NO: 929 - RNA, 36 nt, Clostridium perfringens
uuauaguaacuaguuaaacucucgauaugcuauacc

SEQ ID NO: 930 - RNA, 36 nt, Clostridium cellulolyticum
auuauagcaacaauucaggcuccgauaugccauaau

SEQ ID NO: 931 - RNA, 36 nt, Acidovorax ebreus; identical to SEQ ID NO: 862

SEQ ID NO: 932 - RNA, 36 nt, Neisseria meningitidis; identical to SEQ ID NO: 849

SEQ ID NO: 933 - RNA, 36 nt, Pasteurella multocida
auuguugcacugcgaaaugagagacguugcuacaau

SEQ ID NO: 934 - RNA, 36 nt, phylotype Rs-D17
uuuguaacuuaucugagagaggaugguuauuauaau

SEQ ID NO: 935 - RNA, 36 nt, Wolinella succinogenes; identical to SEQ ID NO: 863

SEQ ID NO: 936 - RNA, 36 nt, Campylobacter jejuni
auaauacaaaaaucauuuuuuuaaacaaacauaaac

SEQ ID NO: 937 - RNA, 36 nt, Campylobacter jejuni
uauaaucucauaagaaauuuaaaaagggacuaaaau

SEQ ID NO: 938 - RNA, 36 nt, Helicobacter mustelae
guauuugucaauaaauauacuuuauaauggcaagau

SEQ ID NO: 939 - RNA, 36 nt, Roseburia intestinalis
uuguaauaaccuaauuaucacuugguaugauauaau

SEQ ID NO: 940 - RNA, 36 nt, Lactobacillus coryniformis
uuuuauucuauaguaaguuuucagcuaaaauagauc

SEQ ID NO: 941 - RNA, 36 nt, Rhodopseudomonas palustris; identical to SEQ ID NO: 872

SEQ ID NO: 942 - RNA, 36 nt, Cand. Puniceispirillum marinum
uaaccauaggcuccucaaucaccagaguguuauugc

SEQ ID NO: 943 - RNA, 36 nt, Verminephrobacter eiseniae; identical to SEQ ID NO: 877

SEQ ID NO: 944 - RNA, 36 nt, Ralstonia syzygii
guuaguagcaaagcgcaauucccgaucugcuggaaa

SEQ ID NO: 945 - RNA, 36 nt, Azospirillum B510
uuaacggcuggacccccgauccccaucgaauuucca

SEQ ID NO: 946 - RNA, 36 nt, Dinoroseobacter shibae; identical to SEQ ID NO: 876

SEQ ID NO: 947 - RNA, 36 nt, Rhodospirillum rubrum; identical to SEQ ID NO: 874

SEQ ID NO: 948 - RNA, 36 nt, Rhodospirillum rubrum; identical to SEQ ID NO: 875

SEQ ID NO: 949 - RNA, 36 nt, Spirochaeta Buddy
auuagagauaaucgcugguuuuuguuaagauauaac

SEQ ID NO: 950 - RNA, 36 nt, Prevotella ruminicola; identical to SEQ ID NO: 866

SEQ ID NO: 951 - RNA, 36 nt, Flavobacterium columnare
agauaaaauuauucuaaucuuuaaucuuaucacaau

SEQ ID NO: 952 - RNA, 36 nt, Parvibaculum lavamentivorans
cuugcgaaaagcgaccgccucucgauuugcuacaga

SEQ ID NO: 953 - RNA, 44 nt, Capnocytophaga ochracea; identical to SEQ ID NO: 861

SEQ ID NO: 954 - RNA, 48 nt, Fibrobacter succinogenes; identical to SEQ ID NO: 867

SEQ ID NO: 955 - RNA, 36 nt, Nitratifractor salsuginis; identical to SEQ ID NO: 857

SEQ ID NO: 956 - RNA, 36 nt, Akkermansia muciniphila
cuuauacgggaacuccacgauaaggcauuuuacaug

SEQ ID NO: 957 - RNA, 88 nt, Artificial Sequence
  Synthetic sequence
uuggaaccauucaaaacagcauagcaaguuaaaauaaggcuaguccguuaucaacuugaaaaaguggcaccgagucggugcuuuuuuu

SEQ ID NO: 958 - RNA, 77 nt, Artificial Sequence
  Synthetic sequence
caaaacagcauagcaaguuaaaauaaggcuaguccguuaucaacuugaaaaaguggcaccgagucggugcuuuuuuu

SEQ ID NO: 959 - RNA, 61 nt, Artificial Sequence
  Synthetic sequence
caaaacagcauagcaaguuaaaauaaggcuaguccguuaucaacuugaaaaaguuuuuuuu

SEQ ID NO: 960 - RNA, 44 nt, Artificial Sequence
  Synthetic sequence
caaaacagcauagcaaguuaaaauaaggcuaguccguuuuuuuu

SEQ ID NO: 961 - RNA, 72 nt, Artificial Sequence
  Synthetic sequence
caaaacagcauagcaaguuaaaauaaggcuaguccgguucacugccguauaggcagcuaagaaauuuuuuuu

SEQ ID NO: 962 - RNA, 14 nt, Artificial Sequence
  Synthetic sequence
uagcaaguuaaaau

SEQ ID NO: 963 - RNA, 102 nt, Artificial Sequence
  Synthetic sequence
  misc_feature (1)..(80): n is a, c, g, or u
nnnnnnnnnnnnnnnnnnnnnnnnnnnnnnnnnnnnnnnnnnnnnnnnnnnnnnnnnnnnnnnnnnnnnnnnnnnnnnnnguuuuagagcuaugcuguuuug

SEQ ID NO: 964 - RNA, 102 nt, Artificial Sequence
  Synthetic sequence
  misc_feature (1)..(80): n is a, c, g, or u
nnnnnnnnnnnnnnnnnnnnnnnnnnnnnnnnnnnnnnnnnnnnnnnnnnnnnnnnnnnnnnnnnnnnnnnnnnnnnnnnguuuuagagcuauguuauuuug

SEQ ID NO: 965 - RNA, 92 nt, exemplary
  misc_feature (1)..(80): n is a, c, g, or u
nnnnnnnnnnnnnnnnnnnnnnnnnnnnnnnnnnnnnnnnnnnnnnnnnnnnnnnnnnnnnnnnnnnnnnnnnnnnnnnnguuuuagagcua

SEQ ID NO: 966 - RNA, 152 nt, Artificial Sequence
  Synthetic sequence
  misc_feature (37)..(116): n is a, c, g, or u
guuuuagagcuaugcuguuuugaauggucccaaaacnnnnnnnnnnnnnnnnnnnnnnnnnnnnnnnnnnnnnnnnnnnnnnnnnnnnnnnnnnnnnnnnnnnnnnnnnnnnnnnnguuuuagagcuaugcuguuuugaauggucccaaaac

SEQ ID NO: 967 - RNA, 188 nt, Artificial Sequence
  Synthetic sequence
  misc_feature (37)..(116): n is a, c, g, or u
guuuuagagcuaugcuguuuugaauggucccaaaacnnnnnnnnnnnnnnnnnnnnnnnnnnnnnnnnnnnnnnnnnnnnnnnnnnnnnnnnnnnnnnnnnnnnnnnnnnnnnnnnguuuuagagcuaugcuguuuugaauggucccaaaacguuuuagagcuaugcuguuuugaauggucccaaaac

SEQ ID NO: 968 - RNA, 22 nt, exemplary
guuuuagagcuaugcuguuuug

SEQ ID NO: 969 - RNA, 36 nt, Streptococcus pyogenes
guuuuagagcuaugcuguuuugaauggucccaaaac

SEQ ID NO: 970 - RNA, 36 nt, Pasteurella multocida
guuguaguucccucucucauuucgcagugcuacaau

SEQ ID NO: 971 - RNA, 36 nt, Mycoplasma mobile
guuuugguguaguaucauucuuauguauucuuaaac

SEQ ID NO: 972 - RNA, 37 nt, Francisella novicida
guuucaguugcugaauuauuugguaaacuacuguuag

SEQ ID NO: 973 - RNA, 33 nt, Francisella novicida
guuucaguugcugaauuauuugguaaacuacug

SEQ ID NO: 974 - RNA, 36 nt, Streptococcus mutans
guuuuagagcuguguuguuucgaaugguuccaaaac

SEQ ID NO: 975 - RNA, 36 nt, Streptococcus thermophilus; identical to SEQ ID NO: 974

SEQ ID NO: 976 - RNA, 36 nt, Streptococcus thermophilus
guuuuuguacucucaagauuuaaguaacuguacaac

SEQ ID NO: 977 - RNA, 36 nt, Listeria innocua
guuuuagagcuauguuauuuugaaugcuaacaaaac

SEQ ID NO: 978 - RNA, 36 nt, Treponema denticola
guuugagaguuguguaauuuaagauggaucucaaac

SEQ ID NO: 979 - RNA, 36 nt, Neisseria meningitidis
guuguagcucccuuucucauuucgcagugcuacaau

SEQ ID NO: 980 - RNA, 36 nt, Streptococcus gordonii; identical to SEQ ID NO: 976

SEQ ID NO: 981 - RNA, 35 nt, Bifidobacterium bifidum
guuucaaugccugucagaucaaugacuuugaccac

SEQ ID NO: 982 - RNA, 36 nt, Lactobacillus salivarius
guuucagaaguauguuaaaucaauaagguuaagacc

SEQ ID NO: 983 - RNA, 37 nt, Francisella novicida
cuaacaguaguuuaccaaauaauucagcaacugaaac

SEQ ID NO: 984 - RNA, 37 nt, Francisella novicida; identical to SEQ ID NO: 983

SEQ ID NO: 985 - RNA, 37 nt, Legionella pneumophila
ccaauaaucccucaucuaaaaauccaaccacugaaac

SEQ ID NO: 986 - RNA, 36 nt, Nitratifractor salsuginis
guuuuaagaccccucaaaaccccacccuguuacaau

SEQ ID NO: 987 - RNA, 36 nt, Butyrivibrio fibrisolvens
guuuuaguacccgggaaaauuaagugauuggaaaac

SEQ ID NO: 988 - RNA, 36 nt, Streptobacillus moniliformis
gauacagauucuugguaaauuugaauaaugugaaug

SEQ ID NO: 989 - RNA, 36 nt, Mycoplasma mobile; identical to SEQ ID NO: 971

SEQ ID NO: 990 - RNA, 44 nt, Capnocytophaga ochracea
uguuaucaaucgcaaaacuacaaaauuugaaagcaauucacaac

SEQ ID NO: 991 - RNA, 36 nt, Acidovorax ebreus
aguguagcuauccggggugagagagggagcuacaac

SEQ ID NO: 992 - RNA, 36 nt, Wolinella succinogenes
auuauagcgaggaauggcugaguaggcggcuauaac

SEQ ID NO: 993 - RNA, 37 nt, Wolinella succinogenes
gcaacacuuuauagcaaauccgcuuagccugugaaac

SEQ ID NO: 994 - RNA, 37 nt, Wolinella succinogenes; identical to SEQ ID NO: 993

SEQ ID NO: 995 - RNA, 36 nt, Prevotella ruminicola
guugugguuugauguaggaaaggaaugauauacaac

SEQ ID NO: 996 - RNA, 48 nt, Fibrobacter succinogenes
guuguuauugcacuaguaaaacuagaaaaucugaaagcaauucacaac

SEQ ID NO: 997 - RNA, 36 nt, Campylobacter jejuni
auuuuaccauaaagaaauuuaaaaagggacuaaaac

SEQ ID NO: 998 - RNA, 36 nt, Campylobacter jejuni
guuuuagucccuuuuuaaauuucuuuaugguaaaau

SEQ ID NO: 999 - RNA, 36 nt, Pasteurella multocida
auuguagcacugcgaaaugagagagggaacuacaac

SEQ ID NO: 1000 - RNA, 36 nt, Rhodopseudomonas palustris
agccuaccacggggaaaucgguagggaagccacggc

SEQ ID NO: 1001 - RNA, 36 nt, Olsenella uli
guuuuggggcagugucguuuugacugguaaucaaac

SEQ ID NO: 1002 - RNA, 36 nt, Rhodospirillum rubrum
acucuaccauggcggugugggacggggccauggaac

SEQ ID NO: 1003 - RNA, 36 nt, Rhodospirillum rubrum; identical to SEQ ID NO: 1002

SEQ ID NO: 1004 - RNA, 36 nt, Dinoroseobacter shibae
aguuuagcuguucagaauucgggguccagccgcaac

SEQ ID NO: 1005 - RNA, 36 nt, Verminephrobacter eiseniae
auuguagcucacugggauaugcgcacuggccggaac

SEQ ID NO: 1006 - RNA, 37 nt, Francisella novicida; identical to SEQ ID NO: 972

SEQ ID NO: 1007 - RNA, 37 nt, Francisella novicida; identical to SEQ ID NO: 972

SEQ ID NO: 1008 - RNA, 37 nt, Wolinella succinogenes; identical to SEQ ID NO: 993

SEQ ID NO: 1009 - RNA, 37 nt, Wolinella succinogenes; identical to SEQ ID NO: 993

SEQ ID NO: 1010 - RNA, 37 nt, gamma proteobacterium
guuucagagcuuaucccaacaaaccaacagcugaaac

SEQ ID NO: 1011 - RNA, 37 nt, gamma proteobacterium; identical to SEQ ID NO: 1010

SEQ ID NO: 1012 - RNA, 37 nt, Sutterella wadsworthensis
gcgaagaucauaacgcuacgagcuauagcacugaaac

SEQ ID NO: 1013 - RNA, 37 nt, Sutterella wadsworthensis; identical to SEQ ID NO: 1012

SEQ ID NO: 1014 - RNA, 37 nt, Legionella pneumophila; identical to SEQ ID NO: 985

SEQ ID NO: 1015 - RNA, 36 nt, Listeria innocua; identical to SEQ ID NO: 977

SEQ ID NO: 1016 - RNA, 36 nt, Streptococcus thermophilus; identical to SEQ ID NO: 974

SEQ ID NO: 1017 - RNA, 36 nt, Streptococcus mutans; identical to SEQ ID NO: 974

SEQ ID NO: 1018 - RNA, 36 nt, Streptococcus pyogenes; identical to SEQ ID NO: 969

SEQ ID NO: 1019 - RNA, 36 nt, Fusobacterium nucleatum
guuugagaguaauguuauuuuaaauagauucaaaac

SEQ ID NO: 1020 - RNA, 36 nt, Filifactor alocis
guuugagaguaguguaauuucauaugguagucaaac

SEQ ID NO: 1021 - RNA, 36 nt, Treponema denticola; identical to SEQ ID NO: 978

SEQ ID NO: 1022 - RNA, 36 nt, Solobacterium moorei
guuugagaacuauguaaauuaugcugguagcaaaac

SEQ ID NO: 1023 - RNA, 36 nt, Veillonella atypica
guuugcgaguaguguaauucuguaaaucucuaaaac

SEQ ID NO: 1024 - RNA, 36 nt, Finegoldia magna
guuugagaaugauguaauuucauauagguauuaaac

SEQ ID NO: 1025 - RNA, 36 nt, Olsenella uli; identical to SEQ ID NO: 1001

SEQ ID NO: 1026 - RNA, 36 nt, Lactobacillus rhamnosus
gucucagguagaugucagaucaaucaguucaagagc

SEQ ID NO: 1027 - RNA, 36 nt, Lactobacillus gasseri
guuuuagaugguuguuagaucaauaagguuuagauc

SEQ ID NO: 1028 - RNA, 36 nt, Lactobacillus gasseri; identical to SEQ ID NO: 1027

SEQ ID NO: 1029 - RNA, 36 nt, Oenococcus kitaharae
gcuucagaugugugucagaucaaugagguagaaccc

SEQ ID NO: 1030 - RNA, 36 nt, Bifidobacterium bifidum
guuucagaugccugucagaucaaugacuuugaccac

SEQ ID NO: 1031 - RNA, 36 nt, Staphylococcus pseudintermedius
guuuuagcacuauguuuauuuagaaagagguaaaac

SEQ ID NO: 1032 - RNA, 36 nt, Eubacterium rectale
auuuuaguaacugaauaauuuacgugacuguaaaac

SEQ ID NO: 1033 - RNA, 36 nt, Enterococcus faecalis
guuuuuguauucucaauaauuucuuaucaguaaaac

SEQ ID NO: 1034 - RNA, 36 nt, Streptococcus thermophilus; identical to SEQ ID NO: 976

SEQ ID NO: 1035 - RNA, 36 nt, Staphylococcus lugdunensis
guuuuaguacucuguaauuuuagguauaagugauac

SEQ ID NO: 1036 - RNA, 36 nt, Eubacterium dolichum
guuuuguuaccauauggauuuuugcuagauuaagac

SEQ ID NO: 1037 - RNA, 36 nt, Mycoplasma mobile; identical to SEQ ID NO: 971

SEQ ID NO: 1038 - RNA, 36 nt, Mycoplasma ovipneumoniae
guuuuugugcuguacaauuucuuacuagaguaaaac

SEQ ID NO: 1039 - RNA, 36 nt, Mycoplasma gallisepticum
guuuuagcacuguacaauacuuguguaagcaauaac

SEQ ID NO: 1040 - RNA, 36 nt, Mycoplasma canis
guuuuaguguuguacaauauuuggguaaacaauaac

SEQ ID NO: 1041 - RNA, 36 nt, Mycoplasma synoviae
guuuugggguuguacaauuauuuuguuaaguaaaac

SEQ ID NO: 1042 - RNA, 36 nt, Aminomonas paucivorans
agcauagcauuucggagugcggcagggagcuaugac

SEQ ID NO: 1043 - RNA, 36 nt, Clostridium perfringens
auuauagcauaucgagaauuuacuaggaacuauaac

SEQ ID NO: 1044 - RNA, 36 nt, Clostridium cellulolyticum
auuauagcauaucggagccugaauuggagcuauaac

SEQ ID NO: 1045 - RNA, 36 nt, Acidovorax ebreus; identical to SEQ ID NO: 991

SEQ ID NO: 1046 - RNA, 36 nt, Neisseria meningitidis; identical to SEQ ID NO: 979

SEQ ID NO: 1047 - RNA, 36 nt, Pasteurella multocida; identical to SEQ ID NO: 970

SEQ ID NO: 1048 - RNA, 36 nt, phylotype Rs-D17
guuauaguuuccuuccucucucagaugugcuauaau

SEQ ID NO: 1049 - RNA, 36 nt, Wolinella succinogenes; identical to SEQ ID NO: 992

SEQ ID NO: 1050 - RNA, 36 nt, Campylobacter jejuni; identical to SEQ ID NO: 998

SEQ ID NO: 1051 - RNA, 36 nt, Campylobacter jejuni; identical to SEQ ID NO: 998

SEQ ID NO: 1052 - RNA, 36 nt, Helicobacter mustelae
auuuuagcauaaacauauuuaugaaguggcuaaaac

SEQ ID NO: 1053 - RNA, 36 nt, Roseburia intestinalis
auuauaccauaccaagugauaacagggaauuacaac

SEQ ID NO: 1054 - RNA, 36 nt, Lactobacillus coryniformis
gaucuauuuuagcugaaaacugaaggaaucaauagc

SEQ ID NO: 1055 - RNA, 36 nt, Rhodopseudomonas palustris; identical to SEQ ID NO: 1000

SEQ ID NO: 1056 - RNA, 36 nt, Cand. Puniceispirillum marinum
aguauagcacucuggugauugagagccuagagcaac

SEQ ID NO: 1057 - RNA, 36 nt, Verminephrobacter eiseniae; identical to SEQ ID NO: 1005

SEQ ID NO: 1058 - RNA, 36 nt, Ralstonia syzygii
agguuagcagaucgggaauugcgcucuggcuacaac

SEQ ID NO: 1059 - RNA, 36 nt, Azospirillum B510
aguguagccgauggggaucggggguccagccgcaac

SEQ ID NO: 1060 - RNA, 36 nt, Dinoroseobacter shibae; identical to SEQ ID NO: 1004

SEQ ID NO: 1061 - RNA, 36 nt, Rhodospirillum rubrum; identical to SEQ ID NO: 1002

SEQ ID NO: 1062 - RNA, 36 nt, Rhodospirillum rubrum; identical to SEQ ID NO: 1002

SEQ ID NO: 1063 - RNA, 36 nt, Spirochaeta Buddy
ggucaaucuuaacaaaaaucagcggucauccccaac

SEQ ID NO: 1064 - RNA, 36 nt, Prevotella ruminicola; identical to SEQ ID NO: 995

SEQ ID NO: 1065 - RNA, 36 nt, Flavobacterium columnare
guugugguuugauuaaagauuagaaaacacgauauu

SEQ ID NO: 1066 - RNA, 36 nt, Parvibaculum lavamentivorans
agaguagcaaaucgagagacggccgcaauccgcagc

SEQ ID NO: 1067 - RNA, 44 nt, Capnocytophaga ochracea; identical to SEQ ID NO: 990

SEQ ID NO: 1068 - RNA, 48 nt, Fibrobacter succinogenes; identical to SEQ ID NO: 996

SEQ ID NO: 1069 - RNA, 36 nt, Nitratifractor salsuginis; identical to SEQ ID NO: 986

SEQ ID NO: 1070 - RNA, 36 nt, Akkermansia muciniphila
guuguacugugccuuauuuuggauucaaggcaaaac

SEQ ID NO: 1071 - RNA, 44 nt, Artificial Sequence
  Synthetic sequence
guuuuagagcuagaaauagcaaguuaaaauaaggcuaguccguu

SEQ ID NO: 1072 - RNA, 60 nt, Artificial Sequence
  Synthetic sequence
  misc_feature (13)..(17): n is a, c, g, or u
guuuuagagcuannnnnuagcaaguuaaaauaaguuaaaauaaggcuaguccguuaucaa

SEQ ID NO: 1073 - RNA, 68 nt, Artificial Sequence
  Synthetic sequence
guuuuagagcuaugcugaaaagcauagcaaguuaaaaauaaguuaaaauaaggcuaguccguuaucaa

SEQ ID NO: 1074 - RNA, 69 nt, Artificial Sequence
  Synthetic sequence
guuuuagagcuaugcuguuuuggaaacaaaacagcauagcaaguuaaaauaaggcuaguccguuaucaa

SEQ ID NO: 1075 - RNA, 70 nt, Artificial Sequence
  Synthetic sequence
guuuuagagcuaguuuuagagcuagaaauagcaaguuaaaauuagcaaguuaaaauaaggcuaguccguu

SEQ ID NO: 1076 - RNA, 70 nt, Artificial Sequence
  Synthetic sequence
guuuuagagcuauagcaaguuaaaaugaaaguuuuagagcuauagcaaguuaaaauaaggcuaguccguu

SEQ ID NO: 1077 - RNA, 74 nt, Artificial Sequence
  Synthetic sequence
guuuuagagcuagaaauagcaaguuaaaauguuuuagagcuagaaauagcaaguuaaaauaaggcuaguccguu

SEQ ID NO: 1078 - RNA, 119 nt, Artificial Sequence
  Synthetic sequence
guuuuagagcuaugcuguuuuggaaacaaaacagcauagcaaguuaaaauguuuuagagcuaugcuguuuuggaaacaaaacagcauagcaaguuaaaauaaggcuaguccguuaucaa

SEQ ID NO: 1079 - RNA, 12 nt, Artificial Sequence
  Synthetic sequence
guuuuagagcua

SEQ ID NO: 1080 - RNA, 86 nt, Artificial Sequence
  Synthetic sequence
guuaagagcuaugcuggaaacagcauagcaaguuuaaauaaggcuaguccguuaucaacuugaaaaaguggcaccgagucggugcc

SEQ ID NO: 1081 - RNA, 94 nt, Artificial Sequence
  Synthetic sequence
guuuaagagcuaugcuggaaacagcauagcaaguuuaaauaaggcuaguccguuaucaacuugaaaaaguggcacccgagucggugcuuuuuuu

SEQ ID NO: 1082 - RNA, 88 nt, Artificial Sequence
  Synthetic sequence
guuuaagagcuaugcuggaaacagcauagcaaguuuaaauaaggcuaguccguuaucaacuugaaaaaguggcacccgagucggugcu

SEQ ID NO: 1083 - RNA, 94 nt, Artificial Sequence
  Synthetic sequence
guuuuagagcuaugcuggaaacagcauagcaaguuaaaauaaggcuaguccguuaucaacuugaaaaaguggcacccgagucggugcuuuuuuu

SEQ ID NO: 1084 - RNA, 88 nt, Artificial Sequence
  Synthetic sequence
guuuuagagcuaugcuggaaacagcauagcaaguuaaaauaaggcuaguccguuaucaacuugaaaaaguggcacccgagucggugcc

SEQ ID NO: 1085 - RNA, 88 nt, Artificial Sequence
  Synthetic sequence
guuuuagagcuaugcuggaaacagcauagcaaguuaaaauaaggcuaguccguuaucaacuugaaaaaguggcacccgagucggugcu

SEQ ID NO: 1086 - RNA, 84 nt, Artificial Sequence
  Synthetic sequence
guuuaagagcuagaaauagcaaguuuaaauaaggcuaguccguuaucaacuugaaaaaguggcacccgagucggugcuuuuuuu

SEQ ID NO: 1087 - RNA, 84 nt, Artificial Sequence
  Synthetic sequence
guuuuagagcuagaaauagcaaguuaaaauaaggcuaguccguuaucaacuugaaaaaguggcacccgagucggugcuuuuuuu

SEQ ID NO: 1088 - RNA, 78 nt, Artificial Sequence
  Synthetic sequence
guuuaagagcuagaaauagcaaguuuaaauaaggcuaguccguuaucaacuugaaaaaguggcacccgagucggugcu

SEQ ID NO: 1089 - RNA, 78 nt, Artificial Sequence
  Synthetic sequence
guuuuagagcuagaaauagcaaguuaaaauaaggcuaguccguuaucaacuugaaaaaguggcacccgagucggugcu

SEQ ID NO: 1090 - RNA, 78 nt, Artificial Sequence
  Synthetic sequence
guuuaagagcuagaaauagcaaguuuaaauaaggcuaguccguuaucaacuugaaaaaguggcacccgagucggugcc

SEQ ID NO: 1091 - RNA, 78 nt, Artificial Sequence
  Synthetic sequence
guuuuagagcuagaaauagcaaguuaaaauaaggcuaguccguuaucaacuugaaaaaguggcacccgagucggugcc

SEQ ID NO: 1092 - RNA, 17 nt, Artificial Sequence
  Synthetic sequence
guuuaagagcuaugcug

SEQ ID NO: 1093 - RNA, 16 nt, Artificial Sequence
  Synthetic sequence
guuuaagagcuaugcu

SEQ ID NO: 1094 - RNA, 12 nt, Artificial Sequence
  Synthetic sequence
guuuaagagcua

SEQ ID NO: 1095 - RNA, 17 nt, Artificial Sequence
  Synthetic sequence
guuuuagagcuaugcug

SEQ ID NO: 1096 - RNA, 16 nt, Artificial Sequence
  Synthetic sequence
guuuuagagcuaugcu

SEQ ID NO: 1097 - RNA, 12 nt, Artificial Sequence
  Synthetic sequence
guuuuagagcua

SEQ ID NO: 1098 - protein, 5 aa, Artificial Sequence
  Synthetic sequence
GSGGS

SEQ ID NO: 1099 - protein, 6 aa, Artificial Sequence
  Synthetic sequence
GGSGGS

SEQ ID NO: 1100 - protein, 4 aa, Artificial Sequence
  Synthetic sequence
GGGS

SEQ ID NO: 1101 - protein, 4 aa, Artificial Sequence
  Synthetic sequence
GGSG

SEQ ID NO: 1102 - protein, 5 aa, Artificial Sequence
  Synthetic sequence
GGSGG

SEQ ID NO: 1103 - protein, 5 aa, Artificial Sequence
  Synthetic sequence
GSGSG

SEQ ID NO: 1104 - protein, 5 aa, Artificial Sequence
  Synthetic sequence
GSGGG

SEQ ID NO: 1105 - protein, 5 aa, Artificial Sequence
  Synthetic sequence
GGGSG

SEQ ID NO: 1106 - protein, 5 aa, Artificial Sequence
  Synthetic sequence
GSSSG

SEQ ID NO: 1107 - DNA, 22 bp, Artificial Sequence
  Synthetic sequence
ggttagggttagggttagggtt

SEQ ID NO: 1108 - DNA, 20 bp, Artificial Sequence
  Synthetic sequence
gtagagtacgctcttgattg

SEQ ID NO: 1109 - DNA, 20 bp, Artificial Sequence
  Synthetic sequence
gattctgccgaaaagaaagt

SEQ ID NO: 1110 - DNA, 22 bp, Artificial Sequence
  Synthetic sequence
ggtgacttttcaggtttcttta

SEQ ID NO: 1111 - DNA, 22 bp, Artificial Sequence
  Synthetic sequence
ggctcttttaggactgggcctc

SEQ ID NO: 1112 - DNA, 22 bp, Artificial
  Synthetic sequence
gggaatcgaacccacaaccttt

SEQ ID NO: 1113 - DNA, 22 bp, Artificial
  Synthetic sequence
ggacagccccagttggaaaaag

SEQ ID NO: 1114 - DNA, 22 bp, Artificial
  Synthetic sequence
ggcctgaagtagaagtacatag

SEQ ID NO: 1115 - DNA, 20 bp, Artificial
  Synthetic sequence
ggaaagggtagggtttccct

SEQ ID NO: 1116 - DNA, 20 bp, Artificial
  Synthetic sequence
ggttacatgctcaaccaaag

SEQ ID NO: 1117 - DNA, 20 bp, Artificial
  Synthetic sequence
ggtccatcatccatcatagc

SEQ ID NO: 1118 - DNA, 20 bp, Artificial
  Synthetic sequence
ggatgatatgcttaaccaac

SEQ ID NO: 1119 - DNA, 20 bp, Artificial
  Synthetic sequence
gggggtgggtccctttgtag

SEQ ID NO: 1120 - DNA, 20 bp, Artificial
  Synthetic sequence
ggccttaatagtcaattgct

SEQ ID NO: 1121 - DNA, 20 bp, Artificial
  Synthetic sequence
ggtttagaatttgaatgtga

SEQ ID NO: 1122 - DNA, 18 bp, Artificial
  Synthetic sequence
aggggtgtccagaagatt

SEQ ID NO: 1123 - DNA, 18 bp, Artificial
  Synthetic sequence
tggaactatcagccctga

SEQ ID NO: 1124 - DNA, 22 bp, Artificial
  Synthetic sequence
ggttccggtaccagtgtgtata

SEQ ID NO: 1125 - DNA, 20 bp, Artificial
  Synthetic sequence
acactcgacctgtccttatg

SEQ ID NO: 1126 - DNA, 18 bp, Artificial
  Synthetic sequence
tctcatgtgtctccttgc

SEQ ID NO: 1127 - DNA, 21 bp, Artificial
  Synthetic sequence
gtaaatcgattctaaattcgg

SEQ ID NO: 1128 - DNA, 18 bp, Artificial
  Synthetic sequence
caacctgtgcctaaatgc

SEQ ID NO: 1129 - DNA, 20 bp, Artificial
  Synthetic sequence
ccccctctctaattacagct

SEQ ID NO: 1130 - DNA, 20 bp, Artificial
  Synthetic sequence
cccaacttggtccttaataa

SEQ ID NO: 1131 - DNA, 18 bp, Artificial
  Synthetic sequence
actcgtctggcgcatttc

SEQ ID NO: 1132 - DNA, 18 bp, Artificial
  Synthetic sequence
ggactgtctttatcggca

SEQ ID NO: 1133 - DNA, 18 bp, Artificial
  Synthetic sequence
agcaggctagacagacag

SEQ ID NO: 1134 - DNA, 18 bp, Artificial
  Synthetic sequence
tctccagcgtgatcattc

SEQ ID NO: 1135 - DNA, 18 bp, Artificial
  Synthetic sequence
gcctgtgatgttggaaag

SEQ ID NO: 1136 - DNA, 18 bp, Artificial
  Synthetic sequence
ctgcgatggaaagatcag

SEQ ID NO: 1137 - DNA, 18 bp, Artificial
  Synthetic sequence
cttcctgacaatgcttgg

SEQ ID NO: 1138 - DNA, 20 bp, Artificial
  Synthetic sequence
aacggcatgtagatgtggtg

SEQ ID NO: 1139 - DNA, 20 bp, Artificial
  Synthetic sequence
tgtccctgttcttatggtgg

SEQ ID NO: 1140 - DNA, 20 bp, Artificial
  Synthetic sequence
gcaggtcgataactcatcac

SEQ ID NO: 1141 - DNA, 19 bp, Artificial
  Synthetic sequence
catcagtgagcagagctgt

SEQ ID NO: 1142 - DNA, 20 bp, Artificial
  Synthetic sequence
gatggcttccttagttcacc

SEQ ID NO: 1143 - DNA, 20 bp, Artificial
  Synthetic sequence
ttccaggttccttcataatg

SEQ ID NO: 1144 - DNA, 18 bp, Artificial
  Synthetic sequence
cccttcccttcaagaatc

SEQ ID NO: 1145 - DNA, 20 bp, Artificial
  Synthetic sequence
ccattgacatgagattctcc

SEQ ID NO: 1146 - DNA, 18 bp, Artificial
  Synthetic sequence
tccaggggtgtctcagag

SEQ ID NO: 1147 - DNA, 18 bp, Artificial
  Synthetic sequence
agcttgaggtcatccaca

SEQ ID NO: 1148 - DNA, 18 bp, Artificial
  Synthetic sequence
ggggatgaaaccttgaag

SEQ ID NO: 1149 - DNA, 19 bp, Artificial
  Synthetic sequence
agctaggcttgaactggaa

SEQ ID NO: 1150 - DNA, 19 bp, Artificial
  Synthetic sequence
gtcatggacctaatcttca

SEQ ID NO: 1151 - DNA, 18 bp, Artificial
  Synthetic sequence
acgccactgttgctaaga

SEQ ID NO: 1152 - DNA, 18 bp, Artificial
  Synthetic sequence
aaggagtgcagcaatctg

SEQ ID NO: 1153 - DNA, 19 bp, Artificial
  Synthetic sequence
atctagtgcaggtgccact

SEQ ID NO: 1154 - DNA, 19 bp, Artificial
  Synthetic sequence
agatggagctagatttgaa

SEQ ID NO: 1155 - DNA, 19 bp, Artificial
  Synthetic sequence
ttaggaggcaggtctcaga

SEQ ID NO: 1156 - DNA, 18 bp, Artificial
  Synthetic sequence
gtccggatgaaatccatg

SEQ ID NO: 1157 - DNA, 20 bp, Artificial
  Synthetic sequence
cccaagtaatggcccataac

SEQ ID NO: 1158 - DNA, 20 bp, Artificial
  Synthetic sequence
ccagcactagtcgtacttca

SEQ ID NO: 1159 - DNA, 20 bp, Artificial
  Synthetic sequence
ggggctgtacttgtatgtct

SEQ ID NO: 1160 - DNA, 23 bp, Artificial
  Synthetic sequence
ggtatacctagagctttatggtg

SEQ ID NO: 1161 - DNA, 20 bp, Artificial
  Synthetic sequence
tctctagtaaccatcagggc

SEQ ID NO: 1162 - DNA, 18 bp, Artificial
  Synthetic sequence
ttcactcttcctgcatcc

SEQ ID NO: 1163 - DNA, 18 bp, Artificial
  Synthetic sequence
atccatatccggcaaaat

SEQ ID NO: 1164 - DNA, 18 bp, Artificial
  Synthetic sequence
actcaacacctgctttgg

SEQ ID NO: 1165 - DNA, 19 bp, Artificial
  Synthetic sequence
gctctttagcacacgattc

SEQ ID NO: 1166 - DNA, 18 bp, Artificial
  Synthetic sequence
gaaccagtgggtcaaaaa

SEQ ID NO: 1167 - DNA, 18 bp, Artificial
  Synthetic sequence
gtggatctgtgccctaaa

SEQ ID NO: 1168 - DNA, 18 bp, Artificial
  Synthetic sequence
ttccttcctcggaagttc

SEQ ID NO: 1169 - DNA, 20 bp, Artificial
  Synthetic sequence
agaaccggtcaggccttcat

SEQ ID NO: 1170 - DNA, 18 bp, Artificial
  Synthetic sequence
gccccagaatcttaacgt

SEQ ID NO: 1171 - DNA, 19 bp, Artificial
  Synthetic sequence
gccccctagtttattaacc

SEQ ID NO: 1172 - DNA, 20 bp, Artificial
  Synthetic sequence
ctcctagatccccctacatt

SEQ ID NO: 1173 - DNA, 19 bp, Artificial
  Synthetic sequence
ccctaggccagtataggat

SEQ ID NO: 1174 - DNA, 18 bp, Artificial
  Synthetic sequence
cgtaggatccatcgatga

SEQ ID NO: 1175 - DNA, 20 bp, Artificial
  Synthetic sequence
tgttcttaggacagtagggc

SEQ ID NO: 1176 - DNA, 19 bp, Artificial
  Synthetic sequence
tgctctagcatcaatggat

SEQ ID NO: 1177 - DNA, 18 bp, Artificial
  Synthetic sequence
tggttggaccttcacttg

SEQ ID NO: 1178 - DNA, 23 bp, Artificial
  Synthetic sequence
ctggactctaggttagctttaca

SEQ ID NO: 1179 - DNA, 18 bp, Artificial
  Synthetic sequence
attcgtcactgggggact

SEQ ID NO: 1180 - DNA, 20 bp, Artificial
  Synthetic sequence
aatgcaccgtataataggtt

SEQ ID NO: 1181 - DNA, 20 bp, Artificial
  Synthetic sequence
gctgtccattgtgagtctac

SEQ ID NO: 1182 - DNA, 20 bp, Artificial
  Synthetic sequence
aactagtgcagcttccaagg

SEQ ID NO: 1183 - DNA, 18 bp, Artificial
  Synthetic sequence
atgttgtgggtcagatgc

SEQ ID NO: 1184 - DNA, 18 bp, Artificial
  Synthetic sequence
ttgtcacgttagttcccc

SEQ ID NO: 1185 - DNA, 18 bp, Artificial
  Synthetic sequence
gaggtccattggtccatt

SEQ ID NO: 1186 - DNA, 18 bp, Artificial
  Synthetic sequence
agctatccgctcatcaca

SEQ ID NO: 1187 - DNA, 18 bp, Artificial
  Synthetic sequence
gtttttccctaagccgag

SEQ ID NO: 1188 - DNA, 23 bp, Artificial
  Synthetic sequence
gagagcagtaattaccataagcc

SEQ ID NO: 1189 - DNA, 19 bp, Artificial
  Synthetic sequence
cccctagtcttcacattcc

SEQ ID NO: 1190 - DNA, 21 bp, Artificial
  Synthetic sequence
tcagaccatggtcagtaagac

SEQ ID NO: 1191 - DNA, 19 bp, Artificial
  Synthetic sequence
ctgcctgattaattgaacc

SEQ ID NO: 1192 - DNA, 18 bp, Artificial
  Synthetic sequence
cccagtggtttctatgga

SEQ ID NO: 1193 - DNA, 18 bp, Artificial
  Synthetic sequence
taggccttggcacttaag

SEQ ID NO: 1194 - DNA, 20 bp, Artificial
  Synthetic sequence
catgtaggaaggaccgtaag

SEQ ID NO: 1195 - DNA, 19 bp, Artificial
  Synthetic sequence
tcctgcatttgtcctagga

SEQ ID NO: 1196 - DNA, 18 bp, Artificial
  Synthetic sequence
ctgctaggccagttttga

SEQ ID NO: 1197 - DNA, 18 bp, Artificial
  Synthetic sequence
attgggctcactgaggat

SEQ ID NO: 1198 - DNA, 18 bp, Artificial
  Synthetic sequence
tgctgcgagtgtcagtta

SEQ ID NO: 1199 - DNA, 20 bp, Artificial
  Synthetic sequence
ctgttctagaggctggaaca

SEQ ID NO: 1200 - DNA, 20 bp, Artificial
  Synthetic sequence
cagaagcccaggtagactaa

SEQ ID NO: 1201 - DNA, 18 bp, Artificial
  Synthetic sequence
ccagccgcttctactttt

SEQ ID NO: 1202 - DNA, 18 bp, Artificial
  Synthetic sequence
ttagagctcacaggggaa

SEQ ID NO: 1203 - DNA, 18 bp, Artificial
  Synthetic sequence
aaacattcctccgagctc

SEQ ID NO: 1204 - DNA, 19 bp, Artificial
  Synthetic sequence
atagttcccaggtgtgagc

SEQ ID NO: 1205 - DNA, 18 bp, Artificial
  Synthetic sequence
agcgttccacctccttta

SEQ ID NO: 1206 - DNA, 18 bp, Artificial
  Synthetic sequence
cactcggtgattctgttg

SEQ ID NO: 1207 - DNA, 18 bp, Artificial
  Synthetic sequence
aaatcactgcgctacgtg

SEQ ID NO: 1208 - DNA, 18 bp, Artificial
  Synthetic sequence
gcaggaatgtaggaatgc

SEQ ID NO: 1209 - DNA, 18 bp, Artificial
  Synthetic sequence
gagggttgagccaaaagt

SEQ ID NO: 1210 - DNA, 19 bp, Artificial
  Synthetic sequence
tgcaaactaggtaacgagc

SEQ ID NO: 1211 - DNA, 22 bp, Artificial
  Synthetic sequence
cctgtgctagtcttaaggtcca

SEQ ID NO: 1212 - DNA, 19 bp, Artificial
  Synthetic sequence
cggcaaaagagtgatctag

SEQ ID NO: 1213 - DNA, 18 bp, Artificial
  Synthetic sequence
accgaatcctactgcatc

SEQ ID NO: 1214 - DNA, 18 bp, Artificial
  Synthetic sequence
accagctttcatggtgac

SEQ ID NO: 1215 - DNA, 18 bp, Artificial
  Synthetic sequence
tgtgcactaagccacatg

SEQ ID NO: 1216 - DNA, 18 bp, Artificial
  Synthetic sequence
tggctagcatttctgagg

SEQ ID NO: 1217 - DNA, 20 bp, Artificial
  Synthetic sequence
gcaccaccattcaacattgc

SEQ ID NO: 1218 - DNA, 21 bp, Artificial
  Synthetic sequence
gtactagtgcgttttacccag

SEQ ID NO: 1219 - DNA, 18 bp, Artificial
  Synthetic sequence
tgctggtcatggattcac

SEQ ID NO: 1220 - DNA, 18 bp, Artificial
  Synthetic sequence
taagattgacacccctgc

SEQ ID NO: 1221 - DNA, 18 bp, Artificial
  Synthetic sequence
cacagttgctgggataga

SEQ ID NO: 1222 - DNA, 18 bp, Artificial
  Synthetic sequence
aaacgatgcttctcccag

SEQ ID NO: 1223 - DNA, 18 bp, Artificial
  Synthetic sequence
ccaggtttcaccggcaaa

SEQ ID NO: 1224 - DNA, 21 bp, Artificial
  Synthetic sequence
cgtgatcatccctagtaaacc

SEQ ID NO: 1225 - DNA, 20 bp, Artificial
  Synthetic sequence
ccgataacttctcactcacc

SEQ ID NO: 1226 - DNA, 18 bp, Artificial
  Synthetic sequence
gggctgtgctttatccat

SEQ ID NO: 1227 - DNA, 19 bp, Artificial
  Synthetic sequence
tgctttgcctgtgcgctaa

SEQ ID NO: 1228 - DNA, 18 bp, Artificial
  Synthetic sequence
tcttgccaatgactaccg

SEQ ID NO: 1229 - DNA, 20 bp, Artificial
  Synthetic sequence
actttagactagggtaatgc

SEQ ID NO: 1230 - DNA, 19 bp, Artificial
  Synthetic sequence
gcctggttcctactggtac

SEQ ID NO: 1231 - DNA, 18 bp, Artificial
  Synthetic sequence
tcgcccgtgtttgttgta

SEQ ID NO: 1232 - DNA, 18 bp, Artificial
  Synthetic sequence
cccaaccacccttgtttt

SEQ ID NO: 1233 - DNA, 20 bp, Artificial
  Synthetic sequence
atatagttgggggccagtag

SEQ ID NO: 1234 - DNA, 18 bp, Artificial
  Synthetic sequence
agggaggctgaataatgg

SEQ ID NO: 1235 - DNA, 20 bp, Artificial
  Synthetic sequence
ggaggaatggtcagtactga

SEQ ID NO: 1236 - DNA, 21 bp, Artificial
  Synthetic sequence
ccctgtcctagagattagtgg

SEQ ID NO: 1237 - DNA, 18 bp, Artificial
  Synthetic sequence
tggccctagggaggtttt

SEQ ID NO: 1238 - DNA, 18 bp, Artificial
  Synthetic sequence
gcactaccattcatgcat

SEQ ID NO: 1239 - DNA, 21 bp, Artificial
  Synthetic sequence
ccttactcaaaagctagaatg

SEQ ID NO: 1240 - DNA, 18 bp, Artificial
  Synthetic sequence
acagtcatgttgggcttc

SEQ ID NO: 1241 - DNA, 19 bp, Artificial
  Synthetic sequence
cggagagcttacatttcct

SEQ ID NO: 1242 - DNA, 19 bp, Artificial
  Synthetic sequence
tacagatccccctgcagaa

SEQ ID NO: 1243 - DNA, 18 bp, Artificial
  Synthetic sequence
ggctcaaagggatgtgat

SEQ ID NO: 1244 - DNA, 18 bp, Artificial
  Synthetic sequence
ctccaggccttccatcac

SEQ ID NO: 1245 - DNA, 19 bp, Artificial
  Synthetic sequence
aatgtccccggcgatactt

SEQ ID NO: 1246 - DNA, 18 bp, Artificial
  Synthetic sequence
ctcattggattcccggtc

SEQ ID NO: 1247 - DNA, 20 bp, Artificial
  Synthetic sequence
ccagagccaacattagggaa

SEQ ID NO: 1248 - DNA, 21 bp, Artificial
  Synthetic sequence
cactcaccctatcctattcct

SEQ ID NO: 1249 - DNA, 18 bp, Artificial
  Synthetic sequence
gccgtcaaaacactgtgt

SEQ ID NO: 1250 - DNA, 18 bp, Artificial
  Synthetic sequence
tgtgcctggaattcatgt

SEQ ID NO: 1251 - DNA, 18 bp, Artificial
  Synthetic sequence
tctgttgcccaactgaag

SEQ ID NO: 1252 - DNA, 18 bp, Artificial
  Synthetic sequence
gagccaacgacaacaatc

SEQ ID NO: 1253 - DNA, 20 bp, Artificial
  Synthetic sequence
tcactaatcctagcacagaa

SEQ ID NO: 1254 - DNA, 18 bp, Artificial
  Synthetic sequence
gggatgataagaaagccc

SEQ ID NO: 1255 - DNA, 18 bp, Artificial
  Synthetic sequence
ctaggcaaacattctggc

SEQ ID NO: 1256 - DNA, 20 bp, Artificial
  Synthetic sequence
ctgcattcccagtctattcc

SEQ ID NO: 1257 - DNA, 18 bp, Artificial
  Synthetic sequence
gagtcatgaccgatacac

SEQ ID NO: 1258 - DNA, 18 bp, Artificial
  Synthetic sequence
atcactagcaaatgcggg

SEQ ID NO: 1259 - DNA, 18 bp, Artificial
  Synthetic sequence
agaggcaccagggaacaa

SEQ ID NO: 1260 - DNA, 20 bp, Artificial
  Synthetic sequence
ctaggaataagacccagtgc

SEQ ID NO: 1261 - DNA, 18 bp, Artificial
  Synthetic sequence
gaaaaaccttgtggcctc

SEQ ID NO: 1262 - DNA, 18 bp, Artificial
  Synthetic sequence
cagccgtagtcccaattt

SEQ ID NO: 1263 - DNA, 20 bp, Artificial
  Synthetic sequence
cctgtagtgtgattgaggct

SEQ ID NO: 1264 - DNA, 18 bp, Artificial
  Synthetic sequence
ccggccctaattaactga

SEQ ID NO: 1265 - DNA, 18 bp, Artificial
  Synthetic sequence
cacgccctagtgactcac

SEQ ID NO: 1266 - DNA, 18 bp, Artificial
  Synthetic sequence
aaagaccaaagagggagg

SEQ ID NO: 1267 - DNA, 18 bp, Artificial
  Synthetic sequence
cggggagaatagtggatt

SEQ ID NO: 1268 - DNA, 18 bp, Artificial
  Synthetic sequence
atattggcaccggggact

SEQ ID NO: 1269 - DNA, 18 bp, Artificial
  Synthetic sequence
taattgaaccaggcgttg

SEQ ID NO: 1270 - DNA, 20 bp, Artificial
  Synthetic sequence
gttctgctagtgacaggtct

SEQ ID NO: 1271 - DNA, 21 bp, Artificial
  Synthetic sequence
cagatgtggtagacttgtctg

SEQ ID NO: 1272 - DNA, 18 bp, Artificial
  Synthetic sequence
tttatggcactgacaccc

SEQ ID NO: 1273 - DNA, 18 bp, Artificial
  Synthetic sequence
agttttacacccggatcc

SEQ ID NO: 1274 - DNA, 18 bp, Artificial
  Synthetic sequence
cagcgtgcctttaagaac

SEQ ID NO: 1275 - DNA, 20 bp, Artificial
  Synthetic sequence
gtcgctgttaaaccccatgt

SEQ ID NO: 1276 - DNA, 18 bp, Artificial
  Synthetic sequence
tggatcctatgccgtaac

SEQ ID NO: 1277 - DNA, 18 bp, Artificial
  Synthetic sequence
ctttggaccctactcatg

SEQ ID NO: 1278 - DNA, 20 bp, Artificial
  Synthetic sequence
atgcaggatgctagtgagag

SEQ ID NO: 1279 - DNA, 18 bp, Artificial
  Synthetic sequence
ataatggggttctgaggc

SEQ ID NO: 1280 - DNA, 18 bp, Artificial
  Synthetic sequence
cccttaactgccctgaat

SEQ ID NO: 1281 - DNA, 18 bp, Artificial
  Synthetic sequence
agccaacatacctgctca

SEQ ID NO: 1282 - DNA, 18 bp, Artificial
  Synthetic sequence
gcacctagtggcacccat

SEQ ID NO: 1283 - DNA, 18 bp, Artificial
  Synthetic sequence
tatccacacccagggacc

SEQ ID NO: 1284 - DNA, 18 bp, Artificial
  Synthetic sequence
tatagatgtcaccgggca

SEQ ID NO: 1285 - DNA, 20 bp, Artificial
  Synthetic sequence
cagaggatgtcatctgtgtg

SEQ ID NO: 1286 - DNA, 19 bp, Artificial
  Synthetic sequence
gctattttagccccctttg

SEQ ID NO: 1287 - DNA, 18 bp, Artificial
  Synthetic sequence
ccaatactccaggcaaca

SEQ ID NO: 1288 - DNA, 18 bp, Artificial
  Synthetic sequence
gaaagctagcgcaagaaa

SEQ ID NO: 1289 - DNA, 18 bp, Artificial
  Synthetic sequence
gctctccgaatttcccta

SEQ ID NO: 1290 - DNA, 20 bp, Artificial
  Synthetic sequence
tgtggaactagactatgggg

SEQ ID NO: 1291 - DNA, 20 bp, Artificial
  Synthetic sequence
gtcccaactctctcagattg

SEQ ID NO: 1292 - DNA, 18 bp, Artificial
  Synthetic sequence
tgtcatgttctccttccg

SEQ ID NO: 1293 - DNA, 18 bp, Artificial
  Synthetic sequence
ctcaccaggtctgcttca

SEQ ID NO: 1294 - DNA, 18 bp, Artificial
  Synthetic sequence
caatatattgctaggggg

SEQ ID NO: 1295 - DNA, 18 bp, Artificial
  Synthetic sequence
tacaccactttgctgcct

SEQ ID NO: 1296 - DNA, 18 bp, Artificial
  Synthetic sequence
cagatcccgaagattgtg

SEQ ID NO: 1297 - DNA, 18 bp, Artificial
  Synthetic sequence
gtcgtgcgaattgaagtc

SEQ ID NO: 1298 - DNA, 18 bp, Artificial
  Synthetic sequence
ggtaacattcatcggagt

SEQ ID NO: 1299 - DNA, 18 bp, Artificial
  Synthetic sequence
atcaccggcctaatccat

SEQ ID NO: 1300 - DNA, 18 bp, Artificial
  Synthetic sequence
aatagctgagcgccatgt

SEQ ID NO: 1301 - DNA, 18 bp, Artificial
  Synthetic sequence
gcaagccgtatcccaagt

SEQ ID NO: 1302 - DNA, 18 bp, Artificial
  Synthetic sequence
ctgataggatttgggctg

SEQ ID NO: 1303 - DNA, 18 bp, Artificial
  Synthetic sequence
cactggccagagtttttc

SEQ ID NO: 1304 - DNA, 22 bp, Artificial
  Synthetic sequence
ggagaatacctggaagtttaga

SEQ ID NO: 1305 - DNA, 22 bp, Artificial
  Synthetic sequence
ggatggaaatctagatgtttct

SEQ ID NO: 1306 - DNA, 19 bp, Artificial
  Synthetic sequence
ggaggctagcgttattagc

SEQ ID NO: 1307 - DNA, 18 bp, Artificial
  Synthetic sequence
aggcagagatgcagacaa

SEQ ID NO: 1308 - DNA, 18 bp, Artificial
  Synthetic sequence
tggttcagctcagggata

SEQ ID NO: 1309 - DNA, 18 bp, Artificial
  Synthetic sequence
cctccaaatgaagtgacc

SEQ ID NO: 1310 - DNA, 18 bp, Artificial
  Synthetic sequence
cagcccacacagactaaa

SEQ ID NO: 1311 - DNA, 18 bp, Artificial
  Synthetic sequence
gacaactgcaggatcgat

SEQ ID NO: 1312 - DNA, 20 bp, Artificial
  Synthetic sequence
tgttaatgggtctctcttgg

SEQ ID NO: 1313 - DNA, 18 bp, Artificial
  Synthetic sequence
ctgccgcctggtcaaaaa

SEQ ID NO: 1314 - DNA, 20 bp, Artificial
  Synthetic sequence
ttgggtagagggacactatg

SEQ ID NO: 1315 - DNA, 18 bp, Artificial
  Synthetic sequence
tgcaggtgacatagcact

SEQ ID NO: 1316 - DNA, 20 bp, Artificial
  Synthetic sequence
ccttctcacaagacagttcc

SEQ ID NO: 1317 - DNA, 19 bp, Artificial
  Synthetic sequence
gaaagatattgtccccctc

SEQ ID NO: 1318 - DNA, 18 bp, Artificial
  Synthetic sequence
gcgacttgattccttgtg

SEQ ID NO: 1319 - DNA, 18 bp, Artificial
  Synthetic sequence
tcccttgctaccttgttg

SEQ ID NO: 1320 - DNA, 18 bp, Artificial
  Synthetic sequence
ggtttcttgcagttaccg

SEQ ID NO: 1321 - DNA, 18 bp, Artificial
  Synthetic sequence
tatgtgggtgttcaaggc

SEQ ID NO: 1322 - DNA, 18 bp, Artificial
  Synthetic sequence
atgggccatttcaggtat

SEQ ID NO: 1323 - DNA, 20 bp, Artificial
  Synthetic sequence
ggggatgatagcagctacaa

SEQ ID NO: 1324 - DNA, 21 bp, Artificial
  Synthetic sequence
ctgggcactatatagtcagac

SEQ ID NO: 1325 - DNA, 18 bp, Artificial
  Synthetic sequence
gcaacctggagtccatat

SEQ ID NO: 1326 - DNA, 18 bp, Artificial
  Synthetic sequence
gaccaagtggcaaaaacg

SEQ ID NO: 1327 - DNA, 18 bp, Artificial
  Synthetic sequence
gttggatcacctgtgcat

SEQ ID NO: 1328 - DNA, 18 bp, Artificial
  Synthetic sequence
ggggagattccacacttt

SEQ ID NO: 1329 - DNA, 18 bp, Artificial
  Synthetic sequence
aaggctggttggagtcat

SEQ ID NO: 1330 - DNA, 20 bp, Artificial
  Synthetic sequence
actgagtgcaggttctgtct

SEQ ID NO: 1331 - DNA, 19 bp, Artificial
  Synthetic sequence
gaccctttttaggtgacca

SEQ ID NO: 1332 - DNA, 18 bp, Artificial
  Synthetic sequence
aaaggttttgggggactc

SEQ ID NO: 1333 - DNA, 18 bp, Artificial
  Synthetic sequence
tgtcccctctttgctatg

SEQ ID NO: 1334 - DNA, 20 bp, Artificial
  Synthetic sequence
gcctatattgtactgcggag

SEQ ID NO: 1335 - DNA, 19 bp, Artificial
  Synthetic sequence
gacattcgagtttcagagg

SEQ ID NO: 1336 - DNA, 19 bp, Artificial
  Synthetic sequence
gatgtcctcagagctgttg

SEQ ID NO: 1337 - DNA, 20 bp, Artificial
  Synthetic sequence
tgcttgacaactaggttttg

SEQ ID NO: 1338 - DNA, 20 bp, Artificial
  Synthetic sequence
gaagacttacagttgccctg

SEQ ID NO: 1339 - DNA, 18 bp, Artificial
  Synthetic sequence
gaaacaccgggctcattg

SEQ ID NO: 1340 - DNA, 19 bp, Artificial
  Synthetic sequence
ggggatctttattgcctag

SEQ ID NO: 1341 - DNA, 21 bp, Artificial
  Synthetic sequence
ccacatactagcgctattgag

SEQ ID NO: 1342 - DNA, 18 bp, Artificial
  Synthetic sequence
tgttatccagggaggtca

SEQ ID NO: 1343 - DNA, 20 bp, Artificial
  Synthetic sequence
ccctccagccttaaagtaag

SEQ ID NO: 1344 - DNA, 18 bp, Artificial
  Synthetic sequence
acagcactcagggatcaa

SEQ ID NO: 1345 - DNA, 18 bp, Artificial
  Synthetic sequence
cagtaaaacccagtggca

SEQ ID NO: 1346 - DNA, 18 bp, Artificial
  Synthetic sequence
ggaaccaggtgaaaaaca

SEQ ID NO: 1347 - DNA, 18 bp, Artificial
  Synthetic sequence
caactgtttaaccagcgc

SEQ ID NO: 1348 - DNA, 19 bp, Artificial
  Synthetic sequence
tcctgctagtcaagtctgc

SEQ ID NO: 1349 - DNA, 18 bp, Artificial
  Synthetic sequence
aggattggtttctggtgg

SEQ ID NO: 1350 - DNA, 22 bp, Artificial
  Synthetic sequence
tctctctctctctctctctgtg

SEQ ID NO: 1351 - DNA, 18 bp, Artificial
  Synthetic sequence
aactcccaactttcccct

SEQ ID NO: 1352 - DNA, 20 bp, Artificial
  Synthetic sequence
tcactgagctagttcattgg

SEQ ID NO: 1353 - DNA, 18 bp, Artificial
  Synthetic sequence
gctttgaacgagacatgg

SEQ ID NO: 1354 - DNA, 18 bp, Artificial
  Synthetic sequence
ctcaagcaaggtggaaac

SEQ ID NO: 1355 - DNA, 18 bp, Artificial
  Synthetic sequence
accttcaagccgggcttc

SEQ ID NO: 1356 - DNA, 19 bp, Artificial
  Synthetic sequence
agcaatcattaggacctca

SEQ ID NO: 1357 - DNA, 18 bp, Artificial
  Synthetic sequence
tctctcatcactagggcc

SEQ ID NO: 1358 - DNA, 19 bp, Artificial
  Synthetic sequence
gcctatgacaagtgtttgc

SEQ ID NO: 1359 - DNA, 18 bp, Artificial
  Synthetic sequence
tcatcactgcccgtaact

SEQ ID NO: 1360 - DNA, 18 bp, Artificial
  Synthetic sequence
tggtgtagcgtgaaacct

SEQ ID NO: 1361 - DNA, 18 bp, Artificial
  Synthetic sequence
ggtaaccaccgggcactg

SEQ ID NO: 1362 - DNA, 18 bp, Artificial
  Synthetic sequence
gggccagaataactcaca

SEQ ID NO: 1363 - DNA, 22 bp, Artificial
  Synthetic sequence
gcttctgtctagatccttcaca

SEQ ID NO: 1364 - DNA, 18 bp, Artificial
  Synthetic sequence
tgggatgtccacagatct

SEQ ID NO: 1365 - DNA, 19 bp, Artificial
  Synthetic sequence
cagctcctggatatcctat

SEQ ID NO: 1366 - DNA, 18 bp, Artificial
  Synthetic sequence
gctgctgggtatttccat

SEQ ID NO: 1367 - DNA, 22 bp, Artificial
  Synthetic sequence
ccagccactgagggcttattaa

SEQ ID NO: 1368 - DNA, 18 bp, Artificial
  Synthetic sequence
gcgacaaaatagtcccgt

SEQ ID NO: 1369 - DNA, 18 bp, Artificial
  Synthetic sequence
cactgtgtgttatggcga

SEQ ID NO: 1370 - DNA, 18 bp, Artificial
  Synthetic sequence
ctctccaggtcccttgac

SEQ ID NO: 1371 - DNA, 18 bp, Artificial
  Synthetic sequence
tgcaccggagctcacaca

SEQ ID NO: 1372 - DNA, 20 bp, Artificial
  Synthetic sequence
cgaggttgtaactctgctgt

SEQ ID NO: 1373 - DNA, 18 bp, Artificial
  Synthetic sequence
gggcaaagagttaggtac

SEQ ID NO: 1374 - DNA, 18 bp, Artificial
  Synthetic sequence
tcatccggagcaacagta

SEQ ID NO: 1375 - DNA, 18 bp, Artificial
  Synthetic sequence
tgctgaccctgtgcctaa

SEQ ID NO: 1376 - DNA, 18 bp, Artificial
  Synthetic sequence
caacatgtccaggcttgg

SEQ ID NO: 1377 - DNA, 18 bp, Artificial
  Synthetic sequence
ccattgtcaacctgcaac

SEQ ID NO: 1378 - DNA, 18 bp, Artificial
  Synthetic sequence
tatagcgatgaagctgcc

SEQ ID NO: 1379 - DNA, 18 bp, Artificial
  Synthetic sequence
acatcttttctggcgaca

SEQ ID NO: 1380 - DNA, 20 bp, Artificial
  Synthetic sequence
agggagacaagaaccagact

SEQ ID NO: 1381 - DNA, 20 bp, Artificial
  Synthetic sequence
accacggactgggaattact

SEQ ID NO: 1382 - DNA, 18 bp, Artificial
  Synthetic sequence
tctatgtgttctagcggt

SEQ ID NO: 1383 - DNA, 18 bp, Artificial
  Synthetic sequence
cgggatataagacctcct

SEQ ID NO: 1384 - DNA, 18 bp, Artificial
  Synthetic sequence
attgaactagagcgccag

SEQ ID NO: 1385 - DNA, 18 bp, Artificial
  Synthetic sequence
tcaatgcttcaacccagt

SEQ ID NO: 1386 - DNA, 20 bp, Artificial
  Synthetic sequence
gccctatcttggcaggttat

SEQ ID NO: 1387 - DNA, 19 bp, Artificial
  Synthetic sequence
tgtactgactaggtggggg

SEQ ID NO: 1388 - DNA, 21 bp, Artificial
  Synthetic sequence
aaaacttccggttaataagga

SEQ ID NO: 1389 - DNA, 20 bp, Artificial
  Synthetic sequence
atttcgggggtcagcctatt

SEQ ID NO: 1390 - DNA, 20 bp, Artificial
  Synthetic sequence
catgaccctgacaagtccta

SEQ ID NO: 1391 - DNA, 18 bp, Artificial
  Synthetic sequence
tggccctggatgcagaat

SEQ ID NO: 1392 - DNA, 19 bp, Artificial
  Synthetic sequence
gtactttgtgctgcgattg

SEQ ID NO: 1393 - DNA, 18 bp, Artificial
  Synthetic sequence
catttcaaccgaaagcag

SEQ ID NO: 1394 - DNA, 18 bp, Artificial
  Synthetic sequence
tggctgaccggattacta

SEQ ID NO: 1395 - DNA, 20 bp, Artificial
  Synthetic sequence
ggtgtctcatacaaaggtgc

SEQ ID NO: 1396 - DNA, 18 bp, Artificial
  Synthetic sequence
gatcagttccctcccaat

SEQ ID NO: 1397 - DNA, 18 bp, Artificial
  Synthetic sequence
agctgatctgataggctg

SEQ ID NO: 1398 - DNA, 22 bp, Artificial
  Synthetic sequence
cacagtctcctagctacagaga

SEQ ID NO: 1399 - DNA, 20 bp, Artificial
  Synthetic sequence
ccaatgtcctaggagtatcg

SEQ ID NO: 1400 - DNA, 18 bp, Artificial
  Synthetic sequence
tttattgccggcaaagac

SEQ ID NO: 1401 - DNA, 19 bp, Artificial
  Synthetic sequence
attgacctggaagataaat

SEQ ID NO: 1402 - DNA, 20 bp, Artificial
  Synthetic sequence
gtaccttgctggctattcct

SEQ ID NO: 1403 - DNA, 18 bp, Artificial
  Synthetic sequence
tcaaggtggagattgcca

SEQ ID NO: 1404 - DNA, 20 bp, Artificial
  Synthetic sequence
tcccctactgtgagatatcc

SEQ ID NO: 1405 - DNA, 18 bp, Artificial
  Synthetic sequence
tgggcatcacactcatct

SEQ ID NO: 1406 - DNA, 18 bp, Artificial
  Synthetic sequence
tcacaatctcgtcctcca

SEQ ID NO: 1407 - DNA, 18 bp, Artificial
  Synthetic sequence
acaggagaaccgtggatt

SEQ ID NO: 1408 - DNA, 19 bp, Artificial
  Synthetic sequence
ggatggtatggcatgatct

SEQ ID NO: 1409 - DNA, 18 bp, Artificial
  Synthetic sequence
atcctccttattggctgg

What is claimed is:

1. A method of generating a library of DNA molecules encoding Cas9 single guide RNAs (sgRNAs) or Cas9 targeter RNAs, the method comprising:
(a) contacting a target DNA molecule with a first DNA endonuclease that specifically binds to and cleaves within a recognition sequence that includes a Cas9 PAM sequence, to generate a plurality of cleavage fragments;
(b) attaching a first DNA adapter to the plurality of cleavage fragments to generate a plurality of adapter-attached cleavage fragments, each having an adapter segment and a cleavage fragment segment;
(c) contacting the plurality of adapter-attached cleavage fragments with a second DNA endonuclease that specifically binds to a recognition sequence present in the adapter segment and cleaves within the cleavage fragment segment to generate a plurality of adapter-attached Cas9 guide sequences each having an adapter segment and a guide sequence segment;
(d) contacting the plurality of adapter-attached Cas9 guide sequences with a third DNA endonuclease that specifically binds to a recognition sequence present in the adapter segment and cleaves at one or more sites to remove all or a portion of the adapter segment, thereby generating a plurality of Cas9 guide sequences; and
(e) attaching DNA encoding a constant region of a Cas9 sgRNA or a Cas9 targeter RNA to the plurality of Cas9 guide sequences to generate a library of DNA molecules encoding Cas9 sgRNAs or Cas9 targeter RNAs.

2. The method of claim 1, wherein the method includes a step of circularizing the plurality of adapter-attached Cas9 guide sequences.

3. The method of claim 1 or 2, wherein the first DNA adapter comprises said DNA encoding the constant region of a Cas9 sgRNA or a Cas9 targeter RNA.

4. The method of claim 3, wherein said contacting of step (d) removes a portion of the adapter segment that is present between the Cas9 guide sequence and the DNA encoding the constant region of a Cas9 sgRNA or a Cas9 targeter RNA.

5. The method of claim 1, wherein the third DNA endonuclease of step (d) cleaves at or near the junction of the adapter segment and the guide sequence segment, and removes all or most of the adapter segment from the plurality of adapter-attached Cas9 guide sequences

6. The method of claim 5, wherein step (e) comprises attaching a DNA Linker to the plurality of Cas9 guide sequences, wherein the DNA Linker encodes the constant region of the Cas9 sgRNA or the Cas9 targeter RNA.

7. The method of claim 5, wherein step (e) comprises inserting the plurality of Cas9 guide sequences into a vector that encodes the constant region of the Cas9 sgRNA or the Cas9 targeter RNA.

8. The method of any of claims 5-7, wherein the first DNA adapter comprises two recognition sequences that can be specifically bound by the second DNA endonuclease, wherein the two recognition sequences are positioned at opposite ends of the first DNA adapter such that the second DNA endonuclease will cleave within the cleavage fragment segment regardless of the orientation at which the first DNA adapter is attached to each cleavage fragment of the plurality of cleavage fragments.

9. The method of any of claims 1-8, wherein said first DNA endonuclease is selected from: BfaI, HpaII, ScrFI, MspI, BstNI, NciI, BsiSI, HapII, MaeI, XspI, AsuC2I, BcnI, BpuMI, CauII, BciT130I, BptI, BseBI, BsiLI, Bst2UI, BstOI, MvaI, Bme1390I, BmrFI, and MspR9I.

10. The method of any of claims 1-9, wherein step (a) comprises contacting the DNA molecule with two or more PAM-recognition DNA endonucleases that each specifically binds to and cleaves within a recognition sequence that includes a Cas9 PAM sequence.

11. The method of any of claims 1-10, wherein step (a) comprises contacting the DNA molecule with three or more PAM-recognition DNA endonucleases that each specifically binds to and cleaves within a recognition sequence that includes a Cas9 PAM sequence.

12. The method of claim 11, wherein said three or more PAM-recognition DNA endonucleases include BfaI, HpaII, and ScrFI.

13. The method of any of claims 1-12, wherein the second DNA endonuclease cleaves at a distance of from 17 to 30 nucleotides from its recognition sequence.

14. The method of any of claims 1-13, wherein the second DNA endonuclease cleaves at a site that is 17 to 30 nucleotides from the junction of the adapter segment and the cleavage fragment segment.

15. The method of claim 13 or 14, wherein the second DNA endonuclease is a type II DNA endonuclease.

16. The method of claim 15, wherein the second DNA endonuclease is selected from the group consisting of: ApyPI, AquII, AquIII, AquIV, CdpI, CstMI, DraRI, DrdIV, MaqI, MmeI, NhaXI, NlaCI, NmeAIII, PlaDI, PspOMII, PspPRI, RceI, RpaB5I, SdeAI, SpoDI, and BsbI.

17. The method of any of claims 1-16, wherein the generated DNA molecules encoding Cas9 sgRNAs or Cas9 targeter RNAs each include a guide sequence that is in a range of from 17 nucleotides to 25 nucleotides in length.

18. The method of any of claims 1-17, wherein the third DNA endonuclease cleaves at a distance of from 1 to 20 nucleotides from its recognition sequence.

19. The method of claim 18, wherein the third DNA endonuclease is BsaXI.

20. The method of any of claims 1-19, wherein in the method comprises a step of blunting cleavage products that are produced by one or more of said steps (a), (c), and (d).

21. The method of claim 20, wherein in the method comprises a step of blunting the plurality of cleavage fragments produced in step (a).

22. The method of claim 20 or 21, wherein said blunting comprises contacting the plurality of cleavage fragments generated in step (a) with a nuclease that removes single stranded overhang DNA.

23. The method of any of claims 1-22, wherein in the method comprises a step of attaching a second DNA adapter to the plurality of adapter-attached Cas9 guide sequences generated in step (c), wherein the second DNA adapter comprises (i) an RNA polymerase promoter positioned such that it is operably linked to the Cas9 guide sequences once the second DNA adapter is attached, and/or (ii) an overhang or recognition sequence for cloning or circularization.

24. The method of any of claims 1-23, further comprising contacting the library of DNA molecules encoding Cas9 sgRNAs or Cas9 targeter RNAs with an RNA polymerase to generate a library of Cas9 sgRNAs or Cas9 targeter RNAs.

25. A kit for generating a library of DNA molecules encoding Cas9 single guide RNAs (sgRNAs) or Cas9 targeter RNAs, the kit comprising:
(a) a first DNA adapter, two DNA oligonucleotides that hybridize to form said first DNA adapter, or a nucleic acid comprising said first DNA adapter, wherein the first DNA adapter comprises:
(i) a first recognition sequence for a first DNA endonuclease that cleaves at a cleavage site outside of the first recognition sequence, wherein the first recognition sequence is positioned within the first DNA adapter such that said first DNA endonuclease will specifically bind to the first recognition sequence and will cleave at a site within a target DNA sequence that is attached to the first DNA adapter; and
(ii) a second recognition sequence for a second DNA endonuclease that cleaves at a cleavage site outside of the second recognition sequence, wherein the second recognition sequence is positioned within the first DNA adapter such that said second DNA endonuclease will cleave within or immediately adjacent to the first recognition sequence.

26. The kit according to claim 25, wherein the first DNA adapter comprises a nucleotide sequence encoding a constant region of a Cas9 sgRNA or a Cas9 targeter RNA.

27. The kit according to claim 25 or claim 26, wherein the kit comprises a vector that comprises said first DNA adapter.

28. The kit according to claim 25, further comprising at least one of: (i) a DNA linker, (ii) two DNA oligonucleotides that hybridize to form said DNA linker, and (iii) a nucleic acid comprising said DNA linker; wherein the DNA linker comprises a nucleotide sequence encoding a constant region of a Cas9 targeter RNA or a Cas9 sgRNA.

29. The kit according to claim 28, wherein the kit comprises a vector that comprises said DNA linker.

30. The kit according to any of claims 25-29, further comprising at least one of: (i) a second DNA adapter, (ii) two DNA oligonucleotides that hybridize to form said second DNA adapter, and (iii) a nucleic acid comprising said second DNA adapter; wherein the second DNA adapter comprises one or more of: (a) an RNA polymerase promoter, (b) a recognition sequence that facilitates cloning, and (c) an overhang.

31. The kit according to claim 30, wherein the kit comprises a vector comprising said second DNA adapter.

32. The kit according to claim 31, wherein the kit comprises a nucleic acid comprising the first and second DNA adapters, wherein (i) the nucleic acid is linear and the first and second DNA adapters are positioned on opposite ends of the nucleic acid, or (ii) the nucleic acid is circular and the first and second DNA adapters are positioned adjacent to one another such that cleavage between the first and second DNA adapters will produce a linear nucleic acid in which the first and second DNA adapters are positioned on opposite ends.

33. The kit according to claim 32, wherein the nucleic acid comprising the first and second DNA adapters is a vector.

34. The kit according to claim 33, wherein the vector is a viral vector or a plasmid vector.

35. The kit according to any of claims 25-34, comprising a blunting nuclease that removes single stranded DNA overhangs.

36. The kit according to claim 35, wherein said blunting nuclease is mung bean nuclease.

37. The kit according to any of claims 25-36, wherein the first and/or second DNA adapter includes a recognition sequence that can be specifically bound and cleaved by a PAM-recognition DNA endonuclease.

38. The kit according to any of claims 25-37, wherein the first recognition sequence is a recognition sequence for one or more DNA endonucleases selected from the group consisting of: MmeI, NmeAIII, and BsbI.

39. The kit according to claim 38, wherein the first recognition sequence is a recognition sequence for MmeI.

40. The kit according to any of claims 25-39, wherein the second recognition sequence is a recognition sequence for BsaXI.

41. The kit according to any of claims 25-40, further comprising one or both of: (i) the first DNA endonuclease, and (ii) the second DNA endonuclease.

42. The kit according to any of claims 25-41, wherein the first DNA endonuclease cleaves at a cleavage site that is 17 to 30 nucleotides from the first recognition sequence.

43. The kit according to claim 42, wherein the first DNA endonuclease is selected from the group consisting of: MmeI, NmeAIII, and BsbI.

44. The kit according to claim 43, wherein the first DNA endonuclease is MmeI.

45. The kit according to any of claims 25-44, wherein the second DNA endonuclease cleaves at a cleavage site that is 1 to 20 nucleotides from the second recognition sequence.

46. The kit according to claim 45, wherein the second DNA endonuclease is BsaXI.

47. The kit according to any of claims 25-46, comprising one or more PAM-recognition DNA endonucleases that each specifically binds to and cleaves within a recognition sequence that includes a Cas9 PAM sequence.

48. The kit according to claim 47, comprising two or more PAM-recognition DNA endonucleases that each specifically binds to and cleaves within a recognition sequence that includes a Cas9 PAM sequence.

49. The kit according to claim 48, comprising three or more PAM-recognition DNA endonucleases that each specifically binds to and cleaves within a recognition sequence that includes a Cas9 PAM sequence.

50. The kit according to claim 49, comprising the PAM-recognition DNA endonucleases BfaI, HpaII, and ScrFI.

51. The kit according to any of claims 47-50, wherein the PAM-recognition DNA endonucleases are selected from the group consisting of: BfaI, HpaII, ScrFI, MspI, BstNI, NciI, BsiSI, HapII, MaeI, XspI, AsuC2I, BcnI, BpuMI, CauII, BciT130I, BptI, BseBI, BsiLI, Bst2UI, BstOI, MvaI, Bme1390I, BmrFI, and MspR9I.
